(19) United States
(12) Patent Application Publication
(10) Pub. No.: US 2022/0265812 A1
(43) Pub. Date: Aug. 25, 2022

(54) HIV ANTIGENS AND MHC COMPLEXES

(71) Applicant: Gritstone bio, Inc., Emeryville, CA (US)

(72) Inventors: Roman Yelensky, Newton, MA (US); James Xin Sun, Newton, MA (US); Joshua Klein, Brookline, MA (US); Karin Jooss, Emeryville, CA (US); Ciaran Daniel Scallan, San Francisco, CA (US); Leonid Gitlin, Foster City, CA (US)

(21) Appl. No.: 17/564,920

(22) Filed: Dec. 29, 2021

Related U.S. Application Data
(63) Continuation of application No. PCT/US2020/040630, filed on Jul. 2, 2020.
(60) Provisional application No. 62/869,877, filed on Jul. 2, 2019.
(60) Provisional application No. 63/029,981, filed on May 26, 2020.

(51) Int. Cl. A61K 39/21; A61P 31/18; C12N 15/86

(52) U.S. Cl. CPC A61K 39/21; A61K 2039/545; C12N 15/86; A61P 31/18

(57) ABSTRACT

Disclosed herein are compositions that include antigen-encoding nucleic acid sequences and/or antigen peptides. Also disclosed are nucleotides, cells, and methods associated with the compositions including their use as vaccines against infectious diseases such as HIV.

### CROSS REFERENCE TO RELATED APPLICATIONS

[0001] This application is a Continuation of International Patent Application No. PCT/US2020/040630, filed Jul. 2, 2020, which claims the benefit of and priority to U.S. Provisional Patent Application No. 62/869,877 filed Jul. 2, 2019 and U.S. Provisional Patent Application No. 63/029,981 filed on May 26, 2020, the entire disclosure of each of which is hereby incorporated by reference in its entirety for all purposes.

### SEQUENCE LISTING

[0002] The instant application contains a Sequence Listing which has been submitted electronically in ASCII format and is hereby incorporated by reference in its entirety. Said ASCII copy, created on Jun. 29, 2020, is named GSO-034WO_SL.txt and is 5,642,000 bytes in size.

### BACKGROUND

[0003] Infectious diseases, such as human immunodeficiency virus (HIV), remain difficult to prevent, treat, and/or cure. Therapeutic vaccines are promising, but for diseases such as HIV, they have not achieved therapeutic efficacy such that they can be deployed as a therapy or preventative vaccines for the population.

[0004] One question for vaccine design is how to identify and include the “best” therapeutic antigens for eliciting an anti-HIV response. Existing methods for identifying and predicting presentation of antigens have only achieved low positive predictive value (PPV) and serves as a significant impediment to vaccine design. If vaccines are designed using predictions with a low PPV, most patients are unlikely to receive a therapeutic antigen and fewer still are likely to receive more than one (even assuming all presented peptides are immunogenic). Thus, antigen vaccination with current methods is unlikely to succeed in preventing infections of infectious disease.

[0005] In addition to the challenges of current antigen prediction methods certain challenges also exist with the available vector systems that can be used for antigen delivery in humans, many of which are derived from humans. For example, many humans have pre-existing immunity to human viruses as a result of previous natural exposure, and this immunity can be a major obstacle to the use of recombinant human viruses for antigen delivery for treating infectious diseases.

### SUMMARY

[0006] Disclosed herein is a composition for delivery of an antigen expression system, the antigen expression system comprising: a vector backbone comprising a chimpanzee adenovirus vector, optionally wherein the chimpanzee adenovirus vector is a ChAdV68 vector, or an alphavirus vector, optionally wherein the alphavirus vector is a Venezuelan equine encephalitis virus vector, the vector backbone comprising at least one HIV MHC class I antigen-encoding nucleic acid sequence comprising a MHC class I epitope encoding nucleic acid sequence, optionally wherein the MHC class I epitope encoding nucleic acid sequence encodes a MHC class I epitope comprising at least one HIV epitope selected from the group consisting of the sequences shown in SEQ ID NOs: 325-22349. In various embodiments, the at least one HIV epitope is selected from the group consisting of the sequences shown in SEQ ID NOs: 4113, 4114, 4115, 4427, 4439, 4494, 4495, 4545, 4561, 4956, 4968, 4975, 4982, 5259, 5261, 5459, 5460, 5610, 5643, and 5661. In various embodiments, the antigen expression system comprises 2, 3, 4, 5, 6, 7, 8, 9, 10, 11, 12, 13, 14, 15, 16, 17, 18, 19, or 20 HIV MHC class I antigen-encoding nucleic acid sequences, wherein each HIV MHC class I antigen-encoding nucleic acid sequence comprises a MHC class I epitope encoding nucleic acid sequence that encodes a MHC class I epitope comprising at least one HIV epitope selected from the group consisting of the sequences shown in SEQ ID Nos: 325-22349. In various embodiments, each HIV MHC class I antigen-encoding nucleic acid sequence comprises a MHC class I epitope encoding nucleic acid sequence that encodes a MHC class I epitope comprising at least one HIV epitope selected from the group consisting of the sequences shown in SEQ ID NOs: 4113, 4114, 4115, 4427, 4439, 4494, 4495, 4545, 4561, 4956, 4968, 4975, 4982, 5259, 5261, 5459, 5460, 5610, 5643, and 5661.

[0007] Additionally disclosed herein is a composition for delivery of one or more antigens, the composition comprising one or more HIV MHC class I antigens or one or more nucleic acid sequences encoding one or more HIV MHC class I antigens, each HIV MHC class I antigen comprising a MHC class I epitope comprising at least one HIV epitope selected from the group consisting of the sequences shown in SEQ ID Nos: 325-22349. In various embodiments, the at least one HIV epitope is selected from the group consisting of the sequences shown in SEQ ID NOs: 4113, 4114, 4115, 4427, 4439, 4494, 4495, 4545, 4561, 4956, 4968, 4975, 4982, 5259, 5261, 5459, 5460, 5610, 5643, and 5661. In various embodiments, the composition comprises 2, 3, 4, 5, 6, 7, 8, 9, 10, 11, 12, 13, 14, 15, 16, 17, 18, 19, or 20 HIV MHC class I antigens, wherein each HIV MHC class I antigen comprises a MHC class I epitope comprising at least one HIV epitope selected from the group consisting of the sequences shown in SEQ ID Nos: 325-22349. In various embodiments, each HIV MHC class I antigen comprises a MHC class I epitope comprising at least one HIV epitope selected from the group consisting of the sequences shown in SEQ ID NOs: 4113, 4114, 4115, 4427, 4439, 4494, 4495, 4545, 4561, 4956, 4968, 4975, 4982, 5259, 5261, 5459, 5460, 5610, 5643, and 5661.

[0008] In various embodiments, the MHC class I epitopes are selected by performing the steps of: (a) obtaining at least one of exome, transcriptome, or whole genome nucleotide sequencing, wherein the nucleotide sequencing data is used to obtain data representing peptide sequences of each of a set of antigens; (b) inputting the peptide sequence of each antigen into a presentation model to generate a set of numerical likelihoods that each of the antigens is presented by one or more of the MHC proteins, the set of numerical likelihoods having been identified at least based on received mass spectrometry data; and (c) selecting a subset of the set of antigens based on the set of numerical likelihoods to generate a set of selected antigens which are used to generate the MHC class I epitopes.

[0009] Additionally disclosed herein is a composition for delivery of an antigen expression system comprising one or more vectors, the one or more vectors comprising: (a) a vector backbone, wherein the backbone comprises: (i) at least one promoter nucleotide sequence, and (ii) at least one polyadenylation (poly(A)) sequence; and (b) an antigen cassette, wherein the antigen cassette comprises: (i) at least one antigen-encoding nucleic acid sequence, comprising: (I) at least one HIV MHC class I antigen-encoding nucleic acid sequence, comprising: (A) a MHC class I epitope encoding nucleic acid sequence, wherein the MHC class I epitope encoding nucleic acid sequence encodes a MHC class I epitope comprising at least one HIV epitope selected from the group consisting of the sequences shown in SEQ ID Nos: 325-22349, (B) optionally, a 5′ linker sequence, and (C) optionally, a 3′ linker sequence; (ii) optionally, a second promoter nucleotide sequence operably linked to the antigen-encoding nucleic acid sequence; and (iii) optionally, at least one MHC class II antigen-encoding nucleic acid sequence; (iv) optionally, at least one nucleic acid sequence encoding a GPGPG (SEQ ID NO: 57) amino acid linker sequence; and (v) optionally, at least one second poly(A) sequence, wherein the second poly(A) sequence is a native poly(A) sequence or an exogenous poly(A) sequence to the vector backbone.

[0010] Additionally disclosed herein is a composition for delivery of an antigen expression system comprising one or more vectors, the one or more vectors comprising: (a) a vector backbone, wherein the backbone comprises: (i) at least one promoter nucleotide sequence, and (ii) at least one polyadenylation (poly(A)) sequence; and (b) an antigen cassette, wherein the antigen cassette comprises: (i) at least one antigen-encoding nucleic acid sequence, comprising: (I) at least 10, 11, 12, 13, 14, 15, 16, 17, 18, 19, or 20 HIV MHC class I antigen-encoding nucleic acid sequences linearly linked to each other, wherein each HIV MHC class I antigen-encoding nucleic acid sequence comprises a MHC class I epitope encoding nucleic acid sequence that encodes a MHC class I epitope comprising at least one HIV epitope selected from the group consisting of the sequences shown in SEQ ID NOs: 325-2165, wherein each of the HIV MHC class I antigen-encoding nucleic acid sequences further comprises; (A) optionally, a 5′ linker sequence, and (B) optionally, a 3′ linker sequence; (ii) optionally, a second promoter nucleotide sequence operably linked to the antigen-encoding nucleic acid sequence; and (iii) optionally, at least one MHC class II antigen-encoding nucleic acid sequence; (iv) optionally, at least one nucleic acid sequence encoding a GPGPG (SEQ ID NO: 58) amino acid linker sequence; and (v) optionally, at least one second poly(A) sequence, wherein the second poly(A) sequence is a native poly(A) sequence or an exogenous poly(A) sequence to the vector backbone.

[0011] Additionally disclosed herein is a composition for delivery of an antigen expression system comprising one or more vectors, the one or more vectors comprising: (a) a vector backbone, wherein the backbone comprises: (i) at least one promoter nucleotide sequence, and (ii) at least one polyadenylation (poly(A)) sequence; and (b) an antigen cassette, wherein the antigen cassette comprises: (i) at least one antigen-encoding nucleic acid sequence, comprising: (I) at least 10, 11, 12, 13, 14, 15, 16, 17, 18, 19, or 20 HIV MHC class I antigen-encoding nucleic acid sequences linearly linked to each other, wherein each HIV MHC class I antigen-encoding nucleic acid sequence comprises a MHC class I epitope encoding nucleic acid sequence that encodes a MHC class I epitope comprising at least one HIV epitope selected from the group consisting of the sequences shown in SEQ ID NOs: 2166-4106, wherein each of the HIV MHC class I antigen-encoding nucleic acid sequences further comprises; (A) optionally, a 5′ linker sequence, and (B) optionally, a 3′ linker sequence; (ii) optionally, a second promoter nucleotide sequence operably linked to the antigen-encoding nucleic acid sequence; and (iii) optionally, at least one MHC class II antigen-encoding nucleic acid sequence; (iv) optionally, at least one nucleic acid sequence encoding a GPGPG (SEQ ID NO: 59) amino acid linker sequence; and (v) optionally, at least one second poly(A) sequence, wherein the second poly(A) sequence is a native poly(A) sequence or an exogenous poly(A) sequence to the vector backbone.

[0012] Additionally disclosed herein is a composition for delivery of an antigen expression system comprising one or more vectors, the one or more vectors comprising: (a) a vector backbone, wherein the backbone comprises: (i) at least one promoter nucleotide sequence, and (ii) at least one polyadenylation (poly(A)) sequence; and (b) an antigen cassette, wherein the antigen cassette comprises: (i) at least one antigen-encoding nucleic acid sequence, comprising: (I) at least 10, 11, 12, 13, 14, 15, 16, 17, 18, 19, or 20 HIV MHC class I antigen-encoding nucleic acid sequences linearly linked to each other, wherein each HIV MHC class I antigen-encoding nucleic acid sequence comprises a MHC class I epitope encoding nucleic acid sequence that encodes a MHC class I epitope comprising at least one HIV epitope selected from the group consisting of the sequences shown in SEQ ID NOs: 4107-6241, wherein each of the HIV MHC class I antigen-encoding nucleic acid sequences further comprises; (A) optionally, a 5′ linker sequence, and (B) optionally, a 3′ linker sequence; (ii) optionally, a second promoter nucleotide sequence operably linked to the antigen-encoding nucleic acid sequence; and (iii) optionally, at least one MHC class II antigen-encoding nucleic acid sequence; (iv) optionally, at least one nucleic acid sequence encoding a GPGPG (SEQ ID NO: 60) amino acid linker sequence; and (v) optionally, at least one second poly(A) sequence, wherein the second poly(A) sequence is a native poly(A) sequence or an exogenous poly(A) sequence to the vector backbone.

[0013] Additionally disclosed herein is a composition for delivery of an antigen expression system comprising one or more vectors, the one or more vectors comprising: (a) a vector backbone, wherein the backbone comprises: (i) at least one promoter nucleotide sequence, and (ii) at least one polyadenylation (poly(A)) sequence; and (b) an antigen cassette, wherein the antigen cassette comprises: (i) at least one antigen-encoding nucleic acid sequence, comprising: (I) at least 10, 11, 12, 13, 14, 15, 16, 17, 18, 19, or 20 HIV MHC class I antigen-encoding nucleic acid sequences linearly linked to each other, wherein each HIV MHC class I antigen-encoding nucleic acid sequence comprises a MHC class I epitope encoding nucleic acid sequence that encodes a MHC class I epitope comprising at least one HIV epitope selected from the group consisting of the sequences shown in SEQ ID NOs: 6242-8389, wherein each of the HIV MHC class I antigen-encoding nucleic acid sequences further comprises; (A) optionally, a 5′ linker sequence, and (B) optionally, a 3′ linker sequence; (ii) optionally, a second promoter nucleotide sequence operably linked to the antigen-encoding nucleic acid sequence; and (iii) optionally, at least one MHC class II antigen-encoding nucleic acid sequence; (iv) optionally, at least one nucleic acid sequence encoding a GPGPG (SEQ ID NO: 61) amino acid linker sequence; and (v) optionally, at least one second poly(A) sequence, wherein the second poly(A) sequence is a native poly(A) sequence or an exogenous poly(A) sequence to the vector backbone.

[0014] Additionally disclosed herein is a composition for delivery of an antigen expression system comprising one or more vectors, the one or more vectors comprising: (a) a vector backbone, wherein the backbone comprises: (i) at least one promoter nucleotide sequence, and (ii) at least one polyadenylation (poly(A)) sequence; and (b) an antigen cassette, wherein the antigen cassette comprises: (i) at least one antigen-encoding nucleic acid sequence, comprising: (I) at least 10, 11, 12, 13, 14, 15, 16, 17, 18, 19, or 20 HIV MHC class I antigen-encoding nucleic acid sequences linearly linked to each other, wherein each HIV MHC class I antigen-encoding nucleic acid sequence comprises a MHC class I epitope encoding nucleic acid sequence that encodes a MHC class I epitope comprising at least one HIV epitope selected from the group consisting of the sequences shown in SEQ ID NOs: 8930-10626, wherein each of the HIV MHC class I antigen-encoding nucleic acid sequences further comprises; (A) optionally, a 5′ linker sequence, and (B) optionally, a 3′ linker sequence; (ii) optionally, a second promoter nucleotide sequence operably linked to the antigen-encoding nucleic acid sequence; and (iii) optionally, at least one MHC class II antigen-encoding nucleic acid sequence; (iv) optionally, at least one nucleic acid sequence encoding a GPGPG (SEQ ID NO: 62) amino acid linker sequence; and (v) optionally, at least one second poly(A) sequence, wherein the second poly(A) sequence is a native poly(A) sequence or an exogenous poly(A) sequence to the vector backbone.

[0015] A composition for delivery of an antigen expression system comprising one or more vectors, the one or more vectors comprising: (a) a vector backbone, wherein the backbone comprises: (i) at least one promoter nucleotide sequence, and (ii) at least one polyadenylation (poly(A)) sequence; and (b) an antigen cassette, wherein the antigen cassette comprises: (i) at least one antigen-encoding nucleic acid sequence, comprising: (I) at least 10, 11, 12, 13, 14, 15, 16, 17, 18, 19, or 20 HIV MHC class I antigen-encoding nucleic acid sequences linearly linked to each other, wherein each HIV MHC class I antigen-encoding nucleic acid sequence comprises a MHC class I epitope encoding nucleic acid sequence that encodes a MHC class I epitope comprising at least one HIV epitope selected from the group consisting of the sequences shown in SEQ ID NOs: 10627-12810, wherein each of the HIV MHC class I antigen-encoding nucleic acid sequences further comprises; (A) optionally, a 5′ linker sequence, and (B) optionally, a 3′ linker sequence; (ii) optionally, a second promoter nucleotide sequence operably linked to the antigen-encoding nucleic acid sequence; and (iii) optionally, at least one MHC class II antigen-encoding nucleic acid sequence; (iv) optionally, at least one nucleic acid sequence encoding a GPGPG (SEQ ID NO: 63) amino acid linker sequence; and (v) optionally, at least one second poly(A) sequence, wherein the second poly(A) sequence is a native poly(A) sequence or an exogenous poly(A) sequence to the vector backbone.

[0016] Additionally disclosed herein is a composition for delivery of an antigen expression system comprising one or more vectors, the one or more vectors comprising: (a) a vector backbone, wherein the backbone comprises: (i) at least one promoter nucleotide sequence, and (ii) at least one polyadenylation (poly(A)) sequence; and (b) an antigen cassette, wherein the antigen cassette comprises: (i) at least one antigen-encoding nucleic acid sequence, comprising: (I) at least 10, 11, 12, 13, 14, 15, 16, 17, 18, 19, or 20 HIV MHC class I antigen-encoding nucleic acid sequences linearly linked to each other, wherein each HIV MHC class I antigen-encoding nucleic acid sequence comprises a MHC class I epitope encoding nucleic acid sequence that encodes a MHC class I epitope comprising at least one HIV epitope selected from the group consisting of the sequences shown in SEQ ID NOs: 12811-15079, wherein each of the HIV MHC class I antigen-encoding nucleic acid sequences further comprises; (A) optionally, a 5′ linker sequence, and (B) optionally, a 3′ linker sequence; (ii) optionally, a second promoter nucleotide sequence operably linked to the antigen-encoding nucleic acid sequence; and (iii) optionally, at least one MHC class II antigen-encoding nucleic acid sequence; (iv) optionally, at least one nucleic acid sequence encoding a GPGPG (SEQ ID NO: 64) amino acid linker sequence; and (v) optionally, at least one second poly(A) sequence, wherein the second poly(A) sequence is a native poly(A) sequence or an exogenous poly(A) sequence to the vector backbone.

[0017] Additionally disclosed herein is a composition for delivery of an antigen expression system comprising one or more vectors, the one or more vectors comprising: (a) a vector backbone, wherein the backbone comprises: (i) at least one promoter nucleotide sequence, and (ii) at least one polyadenylation (poly(A)) sequence; and (b) an antigen cassette, wherein the antigen cassette comprises: (i) at least one antigen-encoding nucleic acid sequence, comprising: (I) at least 10, 11, 12, 13, 14, 15, 16, 17, 18, 19, or 20 HIV MHC class I antigen-encoding nucleic acid sequences linearly linked to each other, wherein each HIV MHC class I antigen-encoding nucleic acid sequence comprises a MHC class I epitope encoding nucleic acid sequence that encodes a MHC class I epitope comprising at least one HIV epitope selected from the group consisting of the sequences shown in SEQ ID NOs: 15080-17174, wherein each of the HIV MHC class I antigen-encoding nucleic acid sequences further comprises; (A) optionally, a 5′ linker sequence, and (B) optionally, a 3′ linker sequence; (ii) optionally, a second promoter nucleotide sequence operably linked to the antigen-encoding nucleic acid sequence; and (iii) optionally, at least one MHC class II antigen-encoding nucleic acid sequence; (iv) optionally, at least one nucleic acid sequence encoding a GPGPG (SEQ ID NO: 65) amino acid linker sequence; and (v) optionally, at least one second poly(A) sequence, wherein the second poly(A) sequence is a native poly(A) sequence or an exogenous poly(A) sequence to the vector backbone.

[0018] Additionally disclosed herein is a composition for delivery of an antigen expression system comprising one or more vectors, the one or more vectors comprising: (a) a vector backbone, wherein the backbone comprises: (i) at least one promoter nucleotide sequence, and (ii) at least one polyadenylation (poly(A)) sequence; and (b) an antigen cassette, wherein the antigen cassette comprises: (i) at least one antigen-encoding nucleic acid sequence, comprising: (I) at least 10, 11, 12, 13, 14, 15, 16, 17, 18, 19, or 20 HIV MHC class I antigen-encoding nucleic acid sequences linearly linked to each other, wherein each HIV MHC class I antigen-encoding nucleic acid sequence comprises a MHC class I epitope encoding nucleic acid sequence that encodes a MHC class I epitope comprising at least one HIV epitope selected from the group consisting of the sequences shown in SEQ ID NOs: 17175-19388, wherein each of the HIV MHC class I antigen-encoding nucleic acid sequences further comprises; (A) optionally, a 5′ linker sequence, and (B) optionally, a 3′ linker sequence; (ii) optionally, a second promoter nucleotide sequence operably linked to the antigen-encoding nucleic acid sequence; and (iii) optionally, at least one MHC class II antigen-encoding nucleic acid sequence; (iv) optionally, at least one nucleic acid sequence encoding a GPGPG (SEQ ID NO: 66) amino acid linker sequence; and (v) optionally, at least one second poly(A) sequence, wherein the second poly(A) sequence is a native poly(A) sequence or an exogenous poly(A) sequence to the vector backbone.

[0019] Additionally disclosed herein is a composition for delivery of an antigen expression system comprising one or more vectors, the one or more vectors comprising: (a) a vector backbone, wherein the backbone comprises: (i) at least one promoter nucleotide sequence, and (ii) at least one polyadenylation (poly(A)) sequence; and (b) an antigen cassette, wherein the antigen cassette comprises: (i) at least one antigen-encoding nucleic acid sequence, comprising: (I) at least 10, 11, 12, 13, 14, 15, 16, 17, 18, 19, or 20 HIV MHC class I antigen-encoding nucleic acid sequences linearly linked to each other, wherein each HIV MHC class I antigen-encoding nucleic acid sequence comprises a MHC class I epitope encoding nucleic acid sequence that encodes a MHC class I epitope comprising at least one HIV epitope selected from the group consisting of the sequences shown in SEQ ID NOs: 19389-21003, wherein each of the HIV MHC class I antigen-encoding nucleic acid sequences further comprises; (A) optionally, a 5′ linker sequence, and (B) optionally, a 3′ linker sequence; (ii) optionally, a second promoter nucleotide sequence operably linked to the antigen-encoding nucleic acid sequence; and (iii) optionally, at least one MHC class II antigen-encoding nucleic acid sequence; (iv) optionally, at least one nucleic acid sequence encoding a GPGPG (SEQ ID NO: 67) amino acid linker sequence; and (v) optionally, at least one second poly(A) sequence, wherein the second poly(A) sequence is a native poly(A) sequence or an exogenous poly(A) sequence to the vector backbone.

[0020] Additionally disclosed herein is a composition for delivery of an antigen expression system comprising one or more vectors, the one or more vectors comprising: (a) a vector backbone, wherein the backbone comprises: (i) at least one promoter nucleotide sequence, and (ii) at least one polyadenylation (poly(A)) sequence; and (b) an antigen cassette, wherein the antigen cassette comprises: (i) at least one antigen-encoding nucleic acid sequence, comprising: (I) at least 10, 11, 12, 13, 14, 15, 16, 17, 18, 19, or 20 HIV MHC class I antigen-encoding nucleic acid sequences linearly linked to each other, wherein each HIV MHC class I antigen-encoding nucleic acid sequence comprises a MHC class I epitope encoding nucleic acid sequence that encodes a MHC class I epitope comprising at least one HIV epitope selected from the group consisting of the sequences shown in SEQ ID NOs: 21004-22349, wherein each of the HIV MHC class I antigen-encoding nucleic acid sequences further comprises; (A) optionally, a 5′ linker sequence, and (B) optionally, a 3′ linker sequence; (ii) optionally, a second promoter nucleotide sequence operably linked to the antigen-encoding nucleic acid sequence; and (iii) optionally, at least one MHC class II antigen-encoding nucleic acid sequence; (iv) optionally, at least one nucleic acid sequence encoding a GPGPG (SEQ ID NO: 68) amino acid linker sequence; and (v) optionally, at least one second poly(A) sequence, wherein the second poly(A) sequence is a native poly(A) sequence or an exogenous poly(A) sequence to the vector backbone.

[0021] Additionally disclosed herein is a composition for delivery of an antigen expression system comprising one or more vectors, the one or more vectors comprising: (a) a vector backbone, wherein the vector backbone comprises (i) a chimpanzee adenovirus vector, optionally wherein the chimpanzee adenovirus vector is a ChAdV68 vector, or an alphavirus vector, optionally wherein the alphavirus vector is a Venezuelan equine encephalitis virus vector, and (ii) a 26S promoter nucleotide sequence, and (iii) a polyadenylation (poly(A)) sequence; and (b) an antigen cassette integrated between the 26S promoter nucleotide sequence and the poly(A) sequence, wherein the antigen cassette comprises: (i) at least one antigen-encoding nucleic acid sequence, comprising: (I) at least 10, 11, 12, 13, 14, 15, 16, 17, 18, 19, or 20 HIV MHC class I antigen-encoding nucleic acid sequences linearly linked to each other and each comprising: (A) a MHC class I epitope encoding nucleic acid sequence, wherein the MHC class I epitope encoding nucleic acid sequence encodes a MHC class I epitope 7-15 amino acids in length, and wherein at least one of the MHC class I epitopes is selected from the group consisting of epitope sequences of any one of SEQ ID Nos: 325-22349, (B) a 5′ linker sequence, wherein the 5′ linker sequence encodes a native N-terminal amino acid sequence of the MHC class I epitope, and wherein the 5′ linker sequence encodes a peptide that is at least 3 amino acids in length, (C) a 3′ linker sequence, wherein the 3′ linker sequence encodes a native C-terminal acid sequence of the MHC class I epitope, and wherein the 3′ linker sequence encodes a peptide that is at least 3 amino acids in length, and wherein the antigen cassette is operably linked to the 26S promoter nucleotide sequence, wherein each of the MHC class I antigen-encoding nucleic acid sequences encodes a polypeptide that is between 13 and 25 amino acids in length, and wherein each 3′ end of each MHC class I antigen-encoding nucleic acid sequence is linked to the 5′ end of the following MHC class I antigen-encoding nucleic acid sequence with the exception of the final MHC class I antigen-encoding nucleic acid sequence in the antigen cassette; and (ii) at least two MHC class II antigen-encoding nucleic acid sequences comprising: (I) a PADRE MHC class II sequence, (II) a Tetanus toxoid MHC class II sequence, (III) a first nucleic acid sequence encoding a GPGPG (SEQ ID NO: 69) amino acid linker sequence linking the PADRE MHC class II sequence and the Tetanus toxoid MHC class II sequence, (IV) a second nucleic acid sequence encoding a GPGPG (SEQ ID NO: 70) amino acid linker sequence linking the 5′ end of the at least two MHC class II antigen-encoding nucleic acid sequences to the HIV MHC class I antigen-encoding nucleic acid sequences, (V) optionally, a third nucleic acid sequence encoding a GPGPG (SEQ ID NO: 71) amino acid linker sequence at the 3′ end of the at least two MHC class II antigen-encoding nucleic acid sequences.

[0022] In various embodiments, an ordered sequence of each element of the antigen cassette is described in the formula, from 5′ to 3′, comprising Pₐ-(L5_{b}-N_{c}-L3_{d})_{X}-(G5ₑ-U_{f})_{Y}-G3_{g} wherein P comprises the second promoter nucleotide sequence, where a=0 or 1, N comprises one of the MHC class I epitope encoding nucleic acid sequences, where c=1, L5 comprises the 5′ linker sequence, where b=0 or 1, L3 comprises the 3′ linker sequence, where d=0 or 1, G5 comprises one of the at least one nucleic acid sequences encoding a GPGPG (SEQ ID NO: 72) amino acid linker, where e=0 or 1, G3 comprises one of the at least one nucleic acid sequences encoding a GPGPG (SEQ ID NO: 73) amino acid linker, where g=0 or 1, U comprises one of the at least one MHC class II antigen-encoding nucleic acid sequence, where f=1, X=1 to 400, where for each X the corresponding N_{c} is a epitope encoding nucleic acid sequence, and Y=0, 1, or 2, where for each Y the corresponding U_{f} is an antigen-encoding nucleic acid sequence.

[0023] In various embodiments, for each X the corresponding N_{c} is a distinct MHC class I epitope encoding nucleic acid sequence. In various embodiments, for each Y the corresponding U_{f} is a distinct MHC class II antigen-encoding nucleic acid sequence.

[0024] In various embodiments, a=0, b=1, d=1, e=1, g=1, h=1, X=20, Y=2, the at least one promoter nucleotide sequence is a single 26S promoter nucleotide sequence provided by the backbone, the at least one polyadenylation poly(A) sequence is a poly(A) sequence of at least 100 consecutive A nucleotides (SEQ ID NO: 74) provided by the backbone, each N encodes a MHC class I epitope 7-15 amino acids in length, L5 is a native 5′ linker sequence that encodes a native N-terminal amino acid sequence of the MHC I epitope, and wherein the 5′ linker sequence encodes a peptide that is at least 3 amino acids in length, L3 is a native 3′ linker sequence that encodes a native nucleic-terminal acid sequence of the MHC I epitope, and wherein the 3′ linker sequence encodes a peptide that is at least 3 amino acids in length, U is each of a PADRE class II sequence and a Tetanus toxoid MHC class II sequence, the vector backbone comprises a chimpanzee adenovirus vector, optionally wherein the chimpanzee adenovirus vector is a ChAdV68 vector, or an alphavirus vector, optionally wherein the alphavirus vector is a Venezuelan equine encephalitis virus vector, and each of the MHC class I antigen-encoding nucleic acid sequences encodes a polypeptide that is between 13 and 25 amino acids in length.

[0025] In various embodiments, the composition further comprising a nanoparticulate delivery vehicle. In various embodiments, the nanoparticulate delivery vehicle is a lipid nanoparticle (LNP). In various embodiments, the LNP comprises ionizable amino lipids. In various embodiments, the ionizable amino lipids comprise MC3-like (dilinoleylmethyl-4-dimethylaminobutyrate) molecules. In various embodiments, the nanoparticulate delivery vehicle encapsulates the antigen expression system. In various embodiments, the antigen cassette is integrated between the at least one promoter nucleotide sequence and the at least one poly(A) sequence. In various embodiments, wherein the at least one promoter nucleotide sequence is operably linked to the antigen-encoding nucleic acid sequence. In various embodiments, the one or more vectors comprise one or more +-stranded RNA vectors. In various embodiments, the one or more +-stranded RNA vectors comprise a 5′ 7-methylguanosine (m7g) cap. In various embodiments, the one or more +-stranded RNA vectors are produced by in vitro transcription. In various embodiments, the one or more vectors are self-replicating within a mammalian cell. In various embodiments, the backbone comprises at least one nucleotide sequence of an Aura virus, a Fort Morgan virus, a Venezuelan equine encephalitis virus, a Ross River virus, a Semliki Forest virus, a Sindbis virus, or a Mayaro virus. In various embodiments, the backbone comprises at least one nucleotide sequence of a Venezuelan equine encephalitis virus. In various embodiments, the backbone comprises at least sequences for nonstructural protein-mediated amplification, a 26S promoter sequence, a poly(A) sequence, a nonstructural protein 1 (nsP1) gene, a nsP2 gene, a nsP3 gene, and a nsP4 gene encoded by the nucleotide sequence of the Aura virus, the Fort Morgan virus, the Venezuelan equine encephalitis virus, the Ross River virus, the Semliki Forest virus, the Sindbis virus, or the Mayaro virus. In various embodiments, the backbone comprises at least sequences for nonstructural protein-mediated amplification, a 26S promoter sequence, and a poly(A) sequence encoded by the nucleotide sequence of the Aura virus, the Fort Morgan virus, the Venezuelan equine encephalitis virus, the Ross River virus, the Semliki Forest virus, the Sindbis virus, or the Mayaro virus.

[0026] In various embodiments, sequences for nonstructural protein-mediated amplification are selected from the group consisting of: an alphavirus 5′ UTR, a 51-nt CSE, a 24-nt CSE, a 26S subgenomic promoter sequence, a 19-nt CSE, an alphavirus 3′ UTR, or combinations thereof. In various embodiments, the backbone does not encode structural virion proteins capsid, E2 and E1. In various embodiments, the antigen cassette is inserted in place of structural virion proteins within the nucleotide sequence of the Aura virus, the Fort Morgan virus, the Venezuelan equine encephalitis virus, the Ross River virus, the Semliki Forest virus, the Sindbis virus, or the Mayaro virus. In various embodiments, the Venezuelan equine encephalitis virus comprises the sequence of SEQ ID NO:3 or SEQ ID NO:5. In various embodiments, the Venezuelan equine encephalitis virus comprises the sequence of SEQ ID NO:3 or SEQ ID NO:5 further comprising a deletion between base pair 7544 and 11175. In various embodiments, the backbone comprises the sequence set forth in SEQ ID NO:6 or SEQ ID NO:7.

[0027] In various embodiments, the antigen cassette is inserted at position 7544 to replace the deletion between base pairs 7544 and 11175 as set forth in the sequence of SEQ ID NO:3 or SEQ ID NO:5. In various embodiments, the insertion of the antigen cassette provides for transcription of a polycistronic RNA comprising the nsP1-4 genes and the at least one antigen-encoding nucleic acid sequence, wherein the nsP1-4 genes and the at least one antigen-encoding nucleic acid sequence are in separate open reading frames. In various embodiments, the backbone comprises at least one nucleotide sequence of a chimpanzee adenovirus vector. In various embodiments, the chimpanzee adenovirus vector is a ChAdV68 vector. In various embodiments, the at least one promoter nucleotide sequence is the native 26S promoter nucleotide sequence encoded by the backbone. In various embodiments, the at least one promoter nucleotide sequence is an exogenous RNA promoter. In various embodiments, the second promoter nucleotide sequence is a 26S promoter nucleotide sequence. In various embodiments, the second promoter nucleotide sequence comprises multiple 26S promoter nucleotide sequences, wherein each 26S promoter nucleotide sequence provides for transcription of one or more of the separate open reading frames. In various embodiments, the one or more vectors are each at least 300 nt in size.

[0028] In various embodiments, the one or more vectors are each at least 1 kb in size. In various embodiments, the one or more vectors are each 2 kb in size. In various embodiments, the one or more vectors are each less than 5 kb in size. In various embodiments, at least one of the at least one antigen-encoding nucleic acid sequences encodes a polypeptide sequence or portion thereof that is presented by MHC class I protein. In various embodiments, each antigen-encoding nucleic acid sequence is linked directly to one another. In various embodiments, at least one of the at least one antigen-encoding nucleic acid sequences is linked to a distinct antigen-encoding nucleic acid sequence with a nucleic acid sequence encoding a linker. In various embodiments, the linker links two MHC class I epitope sequences or an MHC class I epitope sequence to an MHC class II sequence. In various embodiments, the linker is selected from the group consisting of: (1) consecutive glycine residues, at least 2, 3, 4, 5, 6, 7, 8, 9, or 10 residues in length (SEQ ID NO: 75); (2) consecutive alanine residues, at least 2, 3, 4, 5, 6, 7, 8, 9, or 10 residues in length (SEQ ID NO: 76); (3) two arginine residues (RR); (4) alanine, alanine, tyrosine (AAY); (5) a consensus sequence at least 2, 3, 4, 5, 6, 7, 8, 9, or 10 amino acid residues in length that is processed efficiently by a mammalian proteasome; and (6) one or more native sequences flanking the antigen derived from the cognate protein of origin and that is at least 2, 3, 4, 5, 6, 7, 8, 9, 10, 11, 12, 13, 14, 15, 16, 17, 18, 19, 20, or 2-20 amino acid residues in length. In various embodiments, the linker links two MHC class II sequences or an MHC class II sequence to an MHC class I epitope sequence. In various embodiments, the linker comprises the sequence GPGPG (SEQ ID NO: 77). In various embodiments, at least one sequence of the at least one antigen-encoding nucleic acid sequences is linked, operably or directly, to a separate or contiguous sequence that enhances the expression, stability, cell trafficking, processing and presentation, and/or immunogenicity of the at least one antigen-encoding nucleic acid sequences.

[0029] In various embodiments, the separate or contiguous sequence comprises at least one of: a ubiquitin sequence, a ubiquitin sequence modified to increase proteasome targeting (e.g., the ubiquitin sequence contains a Gly to Ala substitution at position 76), an immunoglobulin signal sequence (e.g., IgK), a major histocompatibility class I sequence, lysosomal-associated membrane protein (LAMP)-1, human dendritic cell lysosomal-associated membrane protein, and a major histocompatibility class II sequence; optionally wherein the ubiquitin sequence modified to increase proteasome targeting is A76. In various embodiments, the at least one antigen-encoding nucleic acid sequence comprises at least 2-10, 2, 3, 4, 5, 6, 7, 8, 9, 10, 11, 12, 13, 14, 15, 16, 17, 18, 19, or 20 nucleic acid sequences. In various embodiments, the at least one HIV MHC class I antigen-encoding nucleic acid sequence or the at least one antigen-encoding nucleic acid sequence comprises at least 15-20, 11-100, 11-200, 11-300, 11-400, or up to 400 nucleic acid sequences. In various embodiments, wherein the at least one HIV MHC class I antigen-encoding nucleic acid sequence or the at least one antigen-encoding nucleic acid sequence comprises at least 2-400 nucleic acid sequences and wherein at least two of the antigen-encoding nucleic acid sequences encode polypeptide sequences or portions thereof that are presented by MHC class I protein. In various embodiments, at least two of the antigen-encoding nucleic acid sequences encode polypeptide sequences or portions thereof that are presented by MHC class I protein.

[0030] In various embodiments, when administered to the subject and translated, at least one of the antigens encoded by the at least one HIV MHC class I antigen-encoding nucleic acid or the at least one of the MHC class I epitopes are presented on antigen presenting cells resulting in an immune response. In various embodiments, the at least one HIV MHC class I antigen-encoding nucleic acid sequence, when administered to the subject and translated, at least one of the antigens are presented on antigen presenting cells resulting in an immune response, and optionally wherein the expression of each of the at least one antigen-encoding nucleic acid sequences is driven by the at least one promoter nucleotide sequence. In various embodiments, each MHC class I antigen-encoding nucleic acid sequence encodes a polypeptide sequence between 8 and 35 amino acids in length, optionally 9-17, 9-25, 8, 9, 10, 11, 12, 13, 14, 15, 16, 17, 18, 19, 20, 21, 22, 23, 24, 25, 26, 27, 28, 29, 30, 31, 32, 33, 34 or 35 amino acids in length. In various embodiments, the at least one MHC class II antigen-encoding nucleic acid sequence is present. In various embodiments, the at least one MHC class II antigen-encoding nucleic acid sequence is 12-20, 12, 13, 14, 15, 16, 17, 18, 19, 20, or 20-40 amino acids in length. In various embodiments, the at least one MHC class II antigen-encoding nucleic acid sequence is present and comprises at least one universal MHC class II antigen-encoding nucleic acid sequence, optionally wherein the at least one universal sequence comprises at least one of Tetanus toxoid and PADRE. In various embodiments, the at least one promoter nucleotide sequence or the second promoter nucleotide sequence is inducible. In various embodiments, the at least one promoter nucleotide sequence or the second promoter nucleotide sequence is non-inducible. In various embodiments, the at least one poly(A) sequence comprises a poly(A) sequence native to the backbone. In various embodiments, the at least one poly(A) sequence comprises a poly(A) sequence exogenous to the backbone. In various embodiments, the at least one poly(A) sequence is operably linked to at least one of the at least one antigen-encoding nucleic acid sequences. In various embodiments, the at least one poly(A) sequence is at least 20, at least 30, at least 40, at least 50, at least 60, at least 70, at least 80, or at least 90 consecutive A nucleotides (SEQ ID NO: 78). In various embodiments, the at least one poly(A) sequence is at least 100 consecutive A nucleotides (SEQ ID NO: 79).

[0031] In various embodiments, the antigen expression system further comprises at least one of: an intron sequence, a woodchuck hepatitis virus posttranscriptional regulatory element (WPRE) sequence, an internal ribosome entry sequence (IRES) sequence, a nucleotide sequence encoding a 2A self cleaving peptide sequence, a nucleotide sequence encoding a Furin cleavage site, or a sequence in the 5′ or 3′ non-coding region known to enhance the nuclear export, stability, or translation efficiency of mRNA that is operably linked to at least one of the at least one antigen-encoding nucleic acid sequences. In various embodiments, the antigen expression system further comprises a reporter gene, including but not limited to, green fluorescent protein (GFP), a GFP variant, secreted alkaline phosphatase, luciferase, a luciferase variant, or a detectable peptide or epitope. In various embodiments, the detectable peptide or epitope is selected from the group consisting of an HA tag, a Flag tag, a His-tag, or a V5 tag. In various embodiments, the at least one MHC class I antigen-encoding nucleic acid sequence is selected by performing the steps of: (a) obtaining at least one of exome, transcriptome, or whole genome nucleotide sequencing, wherein the nucleotide sequencing data is used to obtain data representing peptide sequences of each of a set of antigens; (b) inputting the peptide sequence of each antigen into a presentation model to generate a set of numerical likelihoods that each of the antigens is presented by one or more of the MHC proteins, the set of numerical likelihoods having been identified at least based on received mass spectrometry data; and (c) selecting a subset of the set of antigens based on the set of numerical likelihoods to generate a set of selected antigens which are used to generate the at least one MHC class I antigen-encoding nucleic acid sequence.

[0032] In various embodiments, each of the MHC class I epitope encoding nucleic acid sequences is selected by performing the steps of: (a) obtaining at least one of exome, transcriptome, or whole genome nucleotide sequencing data, wherein the nucleotide sequencing data is used to obtain data representing peptide sequences of each of a set of antigens; (b) inputting the peptide sequence of each antigen into a presentation model to generate a set of numerical likelihoods that each of the antigens is presented by one or more MHC proteins, the set of numerical likelihoods having been identified at least based on received mass spectrometry data; and (c) selecting a subset of the set of antigens based on the set of numerical likelihoods to generate a set of selected antigens which are used to generate the at least 20 MHC class I antigen-encoding nucleic acid sequences. In various embodiments, a number of the set of selected antigens is 2-20. In various embodiments, the presentation model represents dependence between: (a) presence of a pair of a particular one of the MHC alleles and a particular amino acid at a particular position of a peptide sequence; and (b) likelihood of presentation, by the particular one of the MHC alleles of the pair, of such a peptide sequence comprising the particular amino acid at the particular position.

[0033] In various embodiments, selecting the set of selected antigens comprises selecting antigens that have an increased likelihood of being presented relative to unselected antigens based on the presentation model, optionally wherein the selected antigens have been validated as being presented by one or more specific HLA alleles. In various embodiments, selecting the set of selected antigens comprises selecting antigens that have an increased likelihood of being capable of inducing an immune response in response to presence of HIV in the subject relative to unselected antigens based on the presentation model. In various embodiments, selecting the set of selected antigens comprises selecting antigens that have an increased likelihood of being capable of being presented to naïve T cells by professional antigen presenting cells (APCs) relative to unselected antigens based on the presentation model, optionally wherein the APC is a dendritic cell (DC). In various embodiments, selecting the set of selected antigens comprises selecting antigens that have a decreased likelihood of being subject to inhibition via central or peripheral tolerance relative to unselected antigens based on the presentation model. In various embodiments, selecting the set of selected antigens comprises selecting antigens that have a decreased likelihood of being capable of inducing an autoimmune response to normal tissue in the subject relative to unselected antigens based on the presentation model.

[0034] In various embodiments, exome or transcriptome nucleotide sequencing data is obtained by performing next generation sequencing (NGS) or any massively parallel sequencing approach. In various embodiments, the antigen cassette comprises junctional epitope sequences formed by adjacent sequences in the antigen cassette. In various embodiments, at least one or each junctional epitope sequence has an affinity of greater than 500 nM for MHC. In various embodiments, each junctional epitope sequence is non-self. In various embodiments, each of the MHC class I epitopes is predicted or validated to be capable of presentation by at least one HLA allele present in at least 5% of a population. In various embodiments, each of the MHC class I epitopes is predicted or validated to be capable of presentation by at least one HLA allele, wherein each antigen/HLA pair has an antigen/HLA prevalence of at least 0.01% in a population. In various embodiments, each of the MHC class I epitopes is predicted or validated to be capable of presentation by at least one HLA allele, wherein each antigen/HLA pair has an antigen/HLA prevalence of at least 0.1% in a population.

[0035] Additionally disclosed herein is a pharmaceutical composition comprising the composition describe above and a pharmaceutically acceptable carrier. In various embodiments, the composition further comprises an adjuvant.

[0036] Additionally disclosed herein is an isolated nucleotide sequence or set of isolated nucleotide sequences comprising the antigen cassette of any of the above compositions and one or more elements obtained from the sequence of SEQ ID NO:3 or SEQ ID NO:5, optionally wherein the one or more elements are selected from the group consisting of the sequences necessary for nonstructural protein-mediated amplification, the 26S promoter nucleotide sequence, the poly(A) sequence, and the nsP1-4 genes of the sequence set forth in SEQ ID NO:3 or SEQ ID NO:5, and optionally wherein the nucleotide sequence is cDNA. In various embodiments, the sequence or set of isolated nucleotide sequences comprises the antigen cassette of any of the above compositions inserted at position 7544 of the sequence set forth in SEQ ID NO:6 or SEQ ID NO:7. In various embodiments, the isolated nucleotide sequence further comprises: a T7 or SP6 RNA polymerase promoter nucleotide sequence 5′ of the one or more elements obtained from the sequence of SEQ ID NO:3 or SEQ ID NO:5; and optionally, one or more restriction sites 3′ of the poly(A) sequence. In various embodiments, the antigen cassette of any of the above compositions is inserted at position 7563 of SEQ ID NO:8 or SEQ ID NO:9.

[0037] Additionally disclosed herein is a vector or set of vectors comprising the nucleotide sequence described above. Additionally disclosed herein is an isolated cell comprising the nucleotide sequence or set of isolated nucleotide sequences described above, optionally wherein the cell is a BHK-21, CHO, HEK293 or variants thereof, 911, HeLa, A549, LP-293, PER.C6, or AE1-2a cell.

[0038] Additionally disclosed herein is a method for treating a subject with HIV, the method comprising administering to the subject the composition of any of the above compositions or the pharmaceutical composition described above. Additionally disclosed herein is a method for inducing an immune response in a subject, the method comprising administering to the subject the composition of any of the above compositions or the pharmaceutical composition described above. In various embodiments, the subject expresses at least one HLA allele predicted or known to present at least one of the MHC class I epitopes encoded by the one or more vectors of the antigen expression system. In various embodiments, the composition is administered intramuscularly (IM), intradermally (ID), subcutaneously (SC), or intravenously (IV).

[0039] In various embodiments, the composition is administered intramuscularly. In various embodiments, the method further comprises administering to the subject a second vaccine composition. In various embodiments, the second vaccine composition is administered prior to the administration of the composition or the pharmaceutical composition. In various embodiments, the second vaccine composition is administered subsequent to the administration of the composition or the pharmaceutical composition. In various embodiments, the second vaccine composition is the same as the composition or the pharmaceutical composition. In various embodiments, the second vaccine composition is different from the composition or the pharmaceutical composition. In various embodiments, the second vaccine composition comprises a chimpanzee adenovirus vector encoding at least one antigen-encoding nucleic acid sequence. In various embodiments, the at least one antigen-encoding nucleic acid sequence encoded by the chimpanzee adenovirus vector is the same as the at least one antigen-encoding nucleic acid sequence of any of the above compositions.

[0040] Additionally disclosed herein is a method of manufacturing the antigen expression system described above, the method comprising: (a) obtaining a linearized DNA sequence comprising the backbone and the antigen cassette; (b) in vitro transcribing the linearized DNA sequence by addition of the linearized DNA sequence to an in vitro transcription reaction containing all the necessary components to transcribe the linearized DNA sequence into RNA, optionally further comprising in vitro addition of the m7g cap to the resulting RNA; and (c) isolating the one or more vectors from the in vitro transcription reaction. In various embodiments, the linearized DNA sequence is generated by linearizing a DNA plasmid sequence or by amplification using PCR. In various embodiments, the DNA plasmid sequence is generated using one of bacterial recombination or full genome DNA synthesis or full genome DNA synthesis with amplification of synthesized DNA in bacterial cells. In various embodiments, isolating the one or more vectors from the in vitro transcription reaction involves one or more of phenol chloroform extraction, silica column based purification, or similar RNA purification methods.

[0041] Additionally disclosed herein is a method of manufacturing the composition for delivery of the antigen expression system, the method comprising: (a) providing components for the nanoparticulate delivery vehicle; (b) providing the antigen expression system; and (c) providing conditions sufficient for the nanoparticulate delivery vehicle and the antigen expression system to produce the composition for delivery of the antigen expression system. In various embodiments, the conditions are provided by microfluidic mixing.

[0042] Additionally disclosed herein is a method of assessing a subject having HIV, comprising the steps of: a) determining or having determined a HIV subtype of the HIV of the subject; b) determining or having determined whether the subject expresses a HLA allele predicted or known to present a MHC class I epitope encoded by an antigen-encoding nucleic acid sequence in an antigen-based vaccine, and c) determining or having determined that the subject is a candidate for therapy with the antigen-based vaccine when the subject expresses the HLA allele, and the HIV subtype expresses the MHC class I epitope encoded by the antigen-encoding nucleic acid sequence in the antigen-based vaccine, wherein the MHC class I epitope comprises at least one MHC class I epitope sequence selected from the group consisting of epitope sequences of any one of SEQ ID Nos: 325-22349, and d) optionally, administering or having administered the antigen-based vaccine to the subject. In various embodiments, the HLA allele expressed by the subject is selected from the group consisting of HLA alleles in Tables 35-45.

[0043] Additionally disclosed herein is a method of assessing a subject having HIV, comprising the steps of: a) determining or having determined the HIV of the subject is HIV subtype A1; b) determining or having determined whether the subject expresses a HLA allele predicted or known to present a MHC class I epitope encoded by an antigen-encoding nucleic acid sequence in an antigen-based vaccine, and c) determining or having determined that the subject is a candidate for therapy with the antigen-based vaccine when the subject expresses the HLA allele, and the HIV subtype expresses the MHC class I epitope encoded by the antigen-encoding nucleic acid sequence in the antigen-based vaccine, wherein the MHC class I epitope comprises at least one MHC class I epitope sequence comprising at least one HIV epitope selected from the group consisting of the sequences shown in SEQ ID NOs: 325-2165, and d) optionally, administering or having administered the antigen-based vaccine to the subject. In various embodiments, the HLA allele expressed by the subject is selected from the group consisting of HLA alleles in Table 35.

[0044] Additionally disclosed herein is a method of assessing a subject having HIV, comprising the steps of: a) determining or having determined the HIV of the subject is HIV subtype A2; b) determining or having determined whether the subject expresses a HLA allele predicted or known to present a MHC class I epitope encoded by an antigen-encoding nucleic acid sequence in an antigen-based vaccine, and c) determining or having determined that the subject is a candidate for therapy with the antigen-based vaccine when the subject expresses the HLA allele, and the HIV subtype expresses the MHC class I epitope encoded by the antigen-encoding nucleic acid sequence in the antigen-based vaccine, wherein the MHC class I epitope comprises at least one MHC class I epitope sequence comprising at least one HIV epitope selected from the group consisting of the sequences shown in SEQ ID NOs: 2166-4106, and d) optionally, administering or having administered the antigen-based vaccine to the subject. In various embodiments, the HLA allele expressed by the subject is selected from the group consisting of HLA alleles in Table 36.

[0045] Additionally disclosed herein is a method of assessing a subject having HIV, comprising the steps of: a) determining or having determined the HIV of the subject is HIV subtype B; b) determining or having determined whether the subject expresses a HLA allele predicted or known to present a MHC class I epitope encoded by an antigen-encoding nucleic acid sequence in an antigen-based vaccine, and c) determining or having determined that the subject is a candidate for therapy with the antigen-based vaccine when the subject expresses the HLA allele, and the HIV subtype expresses the MHC class I epitope encoded by the antigen-encoding nucleic acid sequence in the antigen-based vaccine, wherein the MHC class I epitope comprises at least one MHC class I epitope sequence comprising at least one HIV epitope selected from the group consisting of the sequences shown in SEQ ID NOs: 4107-6241, and d) optionally, administering or having administered the antigen-based vaccine to the subject. In various embodiments, the HLA allele expressed by the subject is selected from the group consisting of HLA alleles in Table 37.

[0046] Additionally disclosed herein is a method of assessing a subject having HIV, comprising the steps of: a) determining or having determined the HIV of the subject is HIV subtype C; b) determining or having determined whether the subject expresses a HLA allele predicted or known to present a MHC class I epitope encoded by an antigen-encoding nucleic acid sequence in an antigen-based vaccine, and c) determining or having determined that the subject is a candidate for therapy with the antigen-based vaccine when the subject expresses the HLA allele, and the HIV subtype expresses the MHC class I epitope encoded by the antigen-encoding nucleic acid sequence in the antigen-based vaccine, wherein the MHC class I epitope comprises at least one MHC class I epitope sequence comprising at least one HIV epitope selected from the group consisting of the sequences shown in SEQ ID NOs: 6242-8389, and d) optionally, administering or having administered the antigen-based vaccine to the subject. In various embodiments, the HLA allele expressed by the subject is selected from the group consisting of HLA alleles in Table 38.

[0047] Additionally disclosed herein is a method of assessing a subject having HIV, comprising the steps of: a) determining or having determined the HIV of the subject is HIV subtype D; b) determining or having determined whether the subject expresses a HLA allele predicted or known to present a MHC class I epitope encoded by an antigen-encoding nucleic acid sequence in an antigen-based vaccine, and c) determining or having determined that the subject is a candidate for therapy with the antigen-based vaccine when the subject expresses the HLA allele, and the HIV subtype expresses the MHC class I epitope encoded by the antigen-encoding nucleic acid sequence in the antigen-based vaccine, wherein the MHC class I epitope comprises at least one MHC class I epitope sequence comprising at least one HIV epitope selected from the group consisting of the sequences shown in SEQ ID NOs: 8930-10626, and d) optionally, administering or having administered the antigen-based vaccine to the subject. In various embodiments, the HLA allele expressed by the subject is selected from the group consisting of HLA alleles in Table 39.

[0048] Additionally disclosed herein is a method of assessing a subject having HIV, comprising the steps of: a) determining or having determined the HIV of the subject is HIV subtype F1; b) determining or having determined whether the subject expresses a HLA allele predicted or known to present a MHC class I epitope encoded by an antigen-encoding nucleic acid sequence in an antigen-based vaccine, and c) determining or having determined that the subject is a candidate for therapy with the antigen-based vaccine when the subject expresses the HLA allele, and the HIV subtype expresses the MHC class I epitope encoded by the antigen-encoding nucleic acid sequence in the antigen-based vaccine, wherein the MHC class I epitope comprises at least one MHC class I epitope sequence selected from the group consisting of epitope sequences from any one of SEQ ID NOs: 10627-12810, and d) optionally, administering or having administered the antigen-based vaccine to the subject. In various embodiments, the HLA allele expressed by the subject is selected from the group consisting of HLA alleles in Table 40.

[0049] Additionally disclosed herein is a method of assessing a subject having HIV, comprising the steps of: a) determining or having determined the HIV of the subject is HIV subtype F2; b) determining or having determined whether the subject expresses a HLA allele predicted or known to present a MHC class I epitope encoded by an antigen-encoding nucleic acid sequence in an antigen-based vaccine, and c) determining or having determined that the subject is a candidate for therapy with the antigen-based vaccine when the subject expresses the HLA allele, and the HIV subtype expresses the MHC class I epitope encoded by the antigen-encoding nucleic acid sequence in the antigen-based vaccine, wherein the MHC class I epitope comprises at least one MHC class I epitope sequence selected from the group consisting of epitope sequences from any one of SEQ ID NOs: 12811-15079, and d) optionally, administering or having administered the antigen-based vaccine to the subject. In various embodiments, the HLA allele expressed by the subject is selected from the group consisting of HLA alleles in Table 41.

[0050] Additionally disclosed herein is a method of assessing a subject having HIV, comprising the steps of: a) determining or having determined the HIV of the subject is HIV subtype G; b) determining or having determined whether the subject expresses a HLA allele predicted or known to present a MHC class I epitope encoded by an antigen-encoding nucleic acid sequence in an antigen-based vaccine, and c) determining or having determined that the subject is a candidate for therapy with the antigen-based vaccine when the subject expresses the HLA allele, and the HIV subtype expresses the MHC class I epitope encoded by the antigen-encoding nucleic acid sequence in the antigen-based vaccine, wherein the MHC class I epitope comprises at least one MHC class I epitope sequence selected from the group consisting of epitope sequences from any one of SEQ ID NOs: 15080-17174, and d) optionally, administering or having administered the antigen-based vaccine to the subject. In various embodiments, the HLA allele expressed by the subject is selected from the group consisting of HLA alleles in Table 42.

[0051] Additionally disclosed herein is a method of assessing a subject having HIV, comprising the steps of: a) determining or having determined the HIV of the subject is HIV subtype H; b) determining or having determined whether the subject expresses a HLA allele predicted or known to present a MHC class I epitope encoded by an antigen-encoding nucleic acid sequence in an antigen-based vaccine, and c) determining or having determined that the subject is a candidate for therapy with the antigen-based vaccine when the subject expresses the HLA allele, and the HIV subtype expresses the MHC class I epitope encoded by the antigen-encoding nucleic acid sequence in the antigen-based vaccine, wherein the MHC class I epitope comprises at least one MHC class I epitope sequence comprising at least one HIV epitope selected from the group consisting of the sequences shown in SEQ ID NOs: 17175-19388, and d) optionally, administering or having administered the antigen-based vaccine to the subject. In various embodiments, the HLA allele expressed by the subject is selected from the group consisting of HLA alleles in Table 43.

[0052] Additionally disclosed herein is a method of assessing a subject having HIV, comprising the steps of: a) determining or having determined the HIV of the subject is HIV subtype J; b) determining or having determined whether the subject expresses a HLA allele predicted or known to present a MHC class I epitope encoded by an antigen-encoding nucleic acid sequence in an antigen-based vaccine, and c) determining or having determined that the subject is a candidate for therapy with the antigen-based vaccine when the subject expresses the HLA allele, and the HIV subtype expresses the MHC class I epitope encoded by the antigen-encoding nucleic acid sequence in the antigen-based vaccine, wherein the MHC class I epitope comprises at least one MHC class I epitope sequence comprising at least one HIV epitope selected from the group consisting of the sequences shown in SEQ ID NOs: 19389-21003, and d) optionally, administering or having administered the antigen-based vaccine to the subject. In various embodiments, the HLA allele expressed by the subject is selected from the group consisting of HLA alleles in Table 44.

[0053] Additionally disclosed herein is a method of assessing a subject having HIV, comprising the steps of: a) determining or having determined the HIV of the subject is HIV subtype K; b) determining or having determined whether the subject expresses a HLA allele predicted or known to present a MHC class I epitope encoded by an antigen-encoding nucleic acid sequence in an antigen-based vaccine, and c) determining or having determined that the subject is a candidate for therapy with the antigen-based vaccine when the subject expresses the HLA allele, and the HIV subtype expresses the MHC class I epitope encoded by the antigen-encoding nucleic acid sequence in the antigen-based vaccine, wherein the MHC class I epitope comprises at least one MHC class I epitope sequence comprising at least one HIV epitope selected from the group consisting of the sequences shown in SEQ ID NOs: 21004-22349, and d) optionally, administering or having administered the antigen-based vaccine to the subject. In various embodiments, the HLA allele expressed by the subject is selected from the group consisting of HLA alleles in Table 45.

[0054] In various embodiments, determining or having determined a HIV subtype of the HIV of the subject comprises obtaining a dataset indicating the HIV subtype from a third party that has processed a sample from the subject. In various embodiments, determining or having determined whether the subject expresses a HLA allele comprises obtaining a dataset from a third party that has processed a sample from the subject. In various embodiments, determining or having determined whether the subject expresses a HLA allele comprises obtaining a sample from the subject and assaying the sample using a method selected from the group consisting of: exome sequencing, targeted exome sequencing, transcriptome sequencing, Sanger sequencing, PCR-based genotyping assays, mass-spectrometry based methods, microarray, Nanostring, ISH, and IHC. In various embodiments, the sample is selected from tissue, bodily fluid, blood, spinal fluid, or needle aspirate. In various embodiments, the HLA allele has an HLA frequency of at least 1%.

[0055] Additionally disclosed herein is a method for treating a subject, the method comprising administering to the subject an antigen-based vaccine, wherein the antigen-based vaccine comprises: 1) at least one MHC class I epitope expressed by a HIV subtype, or 2) a MHC class I epitope encoding nucleic acid sequence encoding the at least one MHC class I epitope, wherein the at least one MHC class I epitope comprises a MHC class I epitope sequence comprising at least one HIV epitope selected from the group consisting of the sequences shown in SEQ ID Nos: 325-22349. Additionally disclosed herein is a method for treating a subject with HIV, the method comprising administering to the subject an antigen-based vaccine, wherein the antigen-based vaccine comprises) at least one MHC class I epitope expressed by a HIV subtype, wherein the HIV subtype is HIV subtype A1, or 2) a MHC class I epitope encoding nucleic acid sequence encoding the at least one MHC class I epitope, wherein the at least one MHC class I epitope comprises a MHC class I epitope sequence comprising at least one HIV epitope selected from the group consisting of the sequences shown in SEQ ID NOs: 325-2165.

[0056] Additionally disclosed herein is a method for treating a subject with HIV, the method comprising administering to the subject an antigen-based vaccine, wherein the antigen-based vaccine comprises: 1) at least one MHC class I epitope expressed by a HIV subtype, wherein the HIV subtype is HIV subtype A2, or 2) a MHC class I epitope encoding nucleic acid sequence encoding the at least one MHC class I epitope, wherein the at least one MHC class I epitope comprises a MHC class I epitope sequence comprising at least one HIV epitope selected from the group consisting of the sequences shown in SEQ ID NOs: 2166-4106.

[0057] Additionally disclosed herein is a method for treating a subject with HIV, the method comprising administering to the subject an antigen-based vaccine, wherein the antigen-based vaccine comprises: 1) at least one MHC class I epitope expressed by a HIV subtype, wherein the HIV subtype is HIV subtype B, or 2) a MHC class I epitope encoding nucleic acid sequence encoding the at least one MHC class I epitope, wherein the at least one MHC class I epitope comprises a MHC class I epitope sequence comprising at least one HIV epitope selected from the group consisting of the sequences shown in SEQ ID NOs: 4107-6241.

[0058] Additionally disclosed herein is a method for treating a subject with HIV, the method comprising administering to the subject an antigen-based vaccine, wherein the antigen-based vaccine comprises: 1) at least one MHC class I epitope expressed by a HIV subtype, wherein the HIV subtype is HIV subtype C, or 2) a MHC class I epitope encoding nucleic acid sequence encoding the at least one MHC class I epitope, wherein the at least one MHC class I epitope comprises a MHC class I epitope sequence comprising at least one HIV epitope selected from the group consisting of the sequences shown in SEQ ID NOs: 6242-8389.

[0059] Additionally disclosed herein is a method comprising administering to the subject an antigen-based vaccine, wherein the antigen-based vaccine comprises: 1) at least one MHC class I epitope expressed by a HIV subtype, wherein the HIV subtype is HIV subtype D, or 2) a MHC class I epitope encoding nucleic acid sequence encoding the at least one MHC class I epitope, wherein the at least one MHC class I epitope comprises a MHC class I epitope sequence comprising at least one HIV epitope selected from the group consisting of the sequences shown in SEQ ID NOs: 8930-10626.

[0060] Additionally disclosed herein is a method for treating a subject with HIV, the method comprising administering to the subject an antigen-based vaccine, wherein the antigen-based vaccine comprises: 1) at least one MHC class I epitope expressed by a HIV subtype, wherein the HIV subtype is HIV subtype F1, or 2) a MHC class I epitope encoding nucleic acid sequence encoding the at least one MHC class I epitope, wherein the at least one MHC class I epitope comprises at least one HIV epitope sequence selected from the group consisting of the sequences shown in SEQ ID NOs: 10627-12810.

[0061] Additionally disclosed herein is a method for treating a subject with HIV, the method comprising administering to the subject an antigen-based vaccine, wherein the antigen-based vaccine comprises: 1) at least one MHC class I epitope expressed by a HIV subtype, wherein the HIV subtype is HIV subtype F2, or 2) a MHC class I epitope encoding nucleic acid sequence encoding the at least one MHC class I epitope, wherein the at least one MHC class I epitope comprises at least one HIV epitope sequence selected from the group consisting of the sequences shown in SEQ ID NOs: 12811-15079.

[0062] Additionally disclosed herein is a method for treating a subject with HIV, the method comprising administering to the subject an antigen-based vaccine, wherein the antigen-based vaccine comprises: 1) at least one MHC class I epitope expressed by a HIV subtype, wherein the HIV subtype is HIV subtype G, or 2) a MHC class I epitope encoding nucleic acid sequence encoding the at least one MHC class I epitope, wherein the at least one MHC class I epitope comprises at least one HIV epitope sequence selected from the group consisting of the sequences shown in SEQ ID NOs: 15080-17174.

[0063] Additionally disclosed herein is a method for treating a subject with HIV, the method comprising administering to the subject an antigen-based vaccine, wherein the antigen-based vaccine comprises: 1) at least one MHC class I epitope expressed by a HIV subtype, wherein the HIV subtype is HIV subtype H, or 2) a MHC class I epitope encoding nucleic acid sequence encoding the at least one MHC class I epitope, wherein the at least one MHC class I epitope comprises a MHC class I epitope sequence comprising at least one HIV epitope selected from the group consisting of the sequences shown in SEQ ID NOs: 17175-19388.

[0064] Additionally disclosed herein is a method for treating a subject with HIV, the method comprising administering to the subject an antigen-based vaccine, wherein the antigen-based vaccine comprises: 1) at least one MHC class I epitope expressed by a HIV subtype, wherein the HIV subtype is HIV subtype J, or 2) a MHC class I epitope encoding nucleic acid sequence encoding the at least one MHC class I epitope, wherein the at least one MHC class I epitope comprises a MHC class I epitope sequence comprising at least one HIV epitope selected from the group consisting of the sequences shown in SEQ ID NOs: 19389-21003.

[0065] Additionally disclosed herein is a method for treating a subject with HIV, the method comprising administering to the subject an antigen-based vaccine, wherein the antigen-based vaccine comprises: 1) at least one MHC class I epitope expressed by a HIV subtype, wherein the HIV subtype is HIV subtype K, or 2) a MHC class I epitope encoding nucleic acid sequence encoding the at least one MHC class I epitope, wherein the at least one MHC class I epitope comprises a MHC class I epitope sequence comprising at least one HIV epitope selected from the group consisting of the sequences shown in SEQ ID NOs: 21004-22349.

[0066] Additionally disclosed herein is a method for inducing an immune response in a subject with HIV, the method comprising administering to the subject an antigen-based vaccine, wherein the antigen-based vaccine comprises: 1) at least one MHC class I epitope expressed by a HIV subtype, or 2) a MHC class I epitope encoding nucleic acid sequence encoding the at least one MHC class I epitope, wherein the at least one MHC class I epitope comprises a MHC class I epitope sequence comprising at least one HIV epitope selected from the group consisting of the sequences shown in SEQ ID Nos: 325-22349.

[0067] Additionally disclosed herein is a method for inducing an immune response in a subject with HIV, the method comprising administering to the subject an antigen-based vaccine, wherein the antigen-based vaccine comprises: 1) at least one MHC class I epitope expressed by a HIV subtype, wherein the HIV subtype is HIV subtype A1, or 2) a MHC class I epitope encoding nucleic acid sequence encoding the at least one MHC class I epitope, wherein the at least one MHC class I epitope comprises a MHC class I epitope sequence comprising at least one HIV epitope selected from the group consisting of the sequences shown in SEQ ID NOs: 325-2165.

[0068] Additionally disclosed herein is a method for inducing an immune response in a subject with HIV, the method comprising administering to the subject an antigen-based vaccine, wherein the antigen-based vaccine comprises: 1) at least one MHC class I epitope expressed by a HIV subtype, wherein the HIV subtype is HIV subtype A2, or 2) a MHC class I epitope encoding nucleic acid sequence encoding the at least one MHC class I epitope, wherein the at least one MHC class I epitope comprises a MHC class I epitope sequence comprising at least one HIV epitope selected from the group consisting of the sequences shown in SEQ ID NOs: 2166-4106.

[0069] Additionally disclosed herein is a method for inducing an immune response in a subject with HIV, the method comprising administering to the subject an antigen-based vaccine, wherein the antigen-based vaccine comprises: 1) at least one MHC class I epitope expressed by a HIV subtype, wherein the HIV subtype is HIV subtype B, or 2) a MHC class I epitope encoding nucleic acid sequence encoding the at least one MHC class I epitope, wherein the at least one MHC class I epitope comprises a MHC class I epitope sequence comprising at least one HIV epitope selected from the group consisting of the sequences shown in SEQ ID NOs: 4107-6241.

[0070] A method for inducing an immune response in a subject with HIV, the method comprising administering to the subject an antigen-based vaccine, wherein the antigen-based vaccine comprises: 1) at least one MHC class I epitope expressed by a HIV subtype, wherein the HIV subtype is HIV subtype C, or 2) a MHC class I epitope encoding nucleic acid sequence encoding the at least one MHC class I epitope, wherein the at least one MHC class I epitope comprises a MHC class I epitope sequence comprising at least one HIV epitope selected from the group consisting of the sequences shown in SEQ ID NOs: 6242-8389.

[0071] Additionally disclosed herein is a method for inducing an immune response in a subject with HIV, the method comprising administering to the subject an antigen-based vaccine, wherein the antigen-based vaccine comprises: 1) at least one MHC class I epitope expressed by a HIV subtype, wherein the HIV subtype is HIV subtype D, or 2) a MHC class I epitope encoding nucleic acid sequence encoding the at least one MHC class I epitope, wherein the at least one MHC class I epitope comprises a MHC class I epitope sequence selected from a group consisting of epitope sequences from any one of SEQ ID NOs: 8930-10626.

[0072] Additionally disclosed herein is a method for inducing an immune response in a subject with HIV, the method comprising administering to the subject an antigen-based vaccine, wherein the antigen-based vaccine comprises: 1) at least one MHC class I epitope expressed by a HIV subtype, wherein the HIV subtype is HIV subtype F1, or 2) a MHC class I epitope encoding nucleic acid sequence encoding the at least one MHC class I epitope, wherein the at least one MHC class I epitope comprises at least one HIV epitope sequence selected from the group consisting of the sequences shown in SEQ ID NOs: 10627-12810.

[0073] Additionally disclosed herein is a method for inducing an immune response in a subject with HIV, the method comprising administering to the subject an antigen-based vaccine, wherein the antigen-based vaccine comprises: 1) at least one MHC class I epitope expressed by a HIV subtype, wherein the HIV subtype is HIV subtype F2, or 2) a MHC class I epitope encoding nucleic acid sequence encoding the at least one MHC class I epitope, wherein the at least one MHC class I epitope comprises at least one HIV epitope sequence selected from the group consisting of the sequences shown in SEQ ID NOs: 12811-15079.

[0074] Additionally disclosed herein is a method for inducing an immune response in a subject with HIV, the method comprising administering to the subject an antigen-based vaccine, wherein the antigen-based vaccine comprises: 1) at least one MHC class I epitope expressed by a HIV subtype, wherein the HIV subtype is HIV subtype G, or 2) a MHC class I epitope encoding nucleic acid sequence encoding the at least one MHC class I epitope, wherein the at least one MHC class I epitope comprises at least one HIV epitope sequence selected from the group consisting of the sequences shown in SEQ ID NOs: 15080-17174.

[0075] Additionally disclosed herein is a method for inducing an immune response in a subject with HIV, the method comprising administering to the subject an antigen-based vaccine, wherein the antigen-based vaccine comprises: 1) at least one MHC class I epitope expressed by a HIV subtype, wherein the HIV subtype is HIV subtype H, or 2) a MHC class I epitope encoding nucleic acid sequence encoding the at least one MHC class I epitope, wherein the at least one MHC class I epitope comprises a MHC class I epitope sequence comprising at least one HIV epitope selected from the group consisting of the sequences shown in SEQ ID NOs: 17175-19388.

[0076] Additionally disclosed herein is a method for inducing an immune response in a subject with HIV, the method comprising administering to the subject an antigen-based vaccine, wherein the antigen-based vaccine comprises: 1) at least one MHC class I epitope expressed by a HIV subtype, wherein the HIV subtype is HIV subtype J, or 2) a MHC class I epitope encoding nucleic acid sequence encoding the at least one MHC class I epitope, wherein the at least one MHC class I epitope comprises a MHC class I epitope sequence comprising at least one HIV epitope selected from the group consisting of the sequences shown in SEQ ID NOs: 19389-21003.

[0077] Additionally disclosed herein is a method for inducing an immune response in a subject with HIV, the method comprising administering to the subject an antigen-based vaccine, wherein the antigen-based vaccine comprises: 1) at least one MHC class I epitope expressed by a HIV subtype, wherein the HIV subtype is HIV subtype K, or 2) a MHC class I epitope encoding nucleic acid sequence encoding the at least one MHC class I epitope, wherein the at least one MHC class I epitope comprises a MHC class I epitope sequence comprising at least one HIV epitope selected from the group consisting of the sequences shown in SEQ ID NOs: 21004-22349.

[0078] In various embodiments, the subject expresses at least one HLA allele predicted or known to present the at least one MHC class I epitope sequence. In various embodiments, the method further comprises: prior to administering to the subject the antigen-based vaccine, determining that the subject is a candidate for receiving the antigen-based vaccine, wherein the determination comprises identifying that 1) the subject expresses an HLA allele known to or predicted to present the at least one MHC class I epitope and 2) the subject has been exposed to or is susceptible to exposure to the HIV subtype. In various embodiments, the at least one HLA allele is selected from the group consisting of HLA alleles in Tables 35-45.

[0079] In various embodiments, wherein the antigen-based vaccine comprises an antigen expression system. In various embodiments, the antigen expression system comprises any one of the antigen expression systems described above. In various embodiments, the antigen-based vaccine comprises any one of the pharmaceutical compositions.

[0080] In various embodiments, each MHC class I epitope comprises a sequence selected from the group consisting of epitope sequences of any one of SEQ ID NOs: 325-2165. In various embodiments, each MHC class I epitope comprises a sequence selected from the group consisting of epitope sequences of any one of SEQ ID NOs: 2166-4106. In various embodiments, each MHC class I epitope comprises a sequence selected from the group consisting of epitope sequences of any one of SEQ ID NOs: 4107-6241. In various embodiments, each MHC class I epitope comprises a sequence selected from the group consisting of epitope sequences of any one of SEQ ID NOs: 6242-8389. In various embodiments, each MHC class I epitope comprises a sequence selected from the group consisting of epitope sequences of any one of SEQ ID NOs: 8930-10626. In various embodiments, each MHC class I epitope comprises a sequence selected from the group consisting of epitope sequences of any one of SEQ ID NOs: 10627-12810. In various embodiments, each MHC class I epitope comprises a sequence selected from the group consisting of epitope sequences of any one of SEQ ID NOs: 12811-15079. In various embodiments, each MHC class I epitope comprises a sequence selected from the group consisting of epitope sequences of any one of SEQ ID NOs: 15080-17174. In various embodiments, each MHC class I epitope comprises a sequence selected from the group consisting of epitope sequences of any one of SEQ ID NOs: 17175-19388. In various embodiments, each MHC class I epitope comprises a sequence selected from the group consisting of epitope sequences of any one of SEQ ID NOs: 19389-21003. In various embodiments, each MHC class I epitope comprises a sequence selected from the group consisting of epitope sequences of any one of SEQ ID NOs: 21004-22349.

[0081] Additionally disclosed herein is a method of assessing a subject having HIV, comprising the steps of: a) determining or having determined that the subject expresses a HLA allele; b) obtaining or having obtained sequencing data of HIV present in that subject; c) selecting candidate epitope sequences for inclusion in an antigen-based vaccine, wherein a first candidate epitope sequence is selected from the group consisting of epitope sequences from any one of SEQ ID Nos: 325-22349, and wherein a second candidate epitope sequence is a mutated epitope sequence, each of the first and second candidate epitope sequences predicted to be presented by the HLA allele expressed by the subject; d) generating the antigen-based vaccine including the selected candidate epitope sequences; and e) optionally, administering or having administered the antigen-based vaccine to the subject.

[0082] Additionally disclosed herein is a method for treating a subject having HIV, comprising the steps of: a) determining or having determined that the subject expresses a HLA allele; b) obtaining or having obtained sequencing data of HIV present in that subject; c) selecting candidate epitope sequences for inclusion in an antigen-based vaccine, wherein a first candidate epitope sequence is selected from the group consisting of epitope sequences from any one of SEQ ID Nos: 325-22349, and wherein a second candidate epitope sequence is a mutated epitope sequence, each of the first and second candidate epitope sequences predicted to be presented by the HLA allele expressed by the subject; d) generating the antigen-based vaccine including the selected candidate epitope sequences; and e) optionally, administering or having administered the antigen-based vaccine to the subject.

[0083] In various embodiments, epitope sequences of any one of SEQ ID Nos: 325-22349 are identified by applying a presentation model trained on HLA presented peptides sequenced by mass spectrometry. In various embodiments, the presentation model exhibits a precision value of 0.28 at a 40% recall rate. In various embodiments the presentation model exhibits an AUC of 0.24.

### BRIEF DESCRIPTION OF THE SEVERAL VIEWS OF THE DRAWINGS

[0084] These and other features, aspects, and advantages of the present invention will become better understood with regard to the following description, and accompanying drawings, where:

[0085] FIG. 1 illustrates development of an in vitro T cell activation assay. Schematic of the assay in which the delivery of a vaccine cassette to antigen presenting cells, leads to expression, processing and MHC-restricted presentation of distinct peptide antigens. Reporter T cells engineered with T cell receptors that match the specific peptide-MHC combination become activated resulting in luciferase expression.

[0086] FIG. 2A illustrates evaluation of linker sequences in short cassettes and shows five class I MHC restricted epitopes (epitopes 1 through 5) concatenated in the same position relative to each other followed by two universal class II MHC epitopes (MHC-II). Various iterations were generated using different linkers. In some cases the T cell epitopes are directly linked to each other. In others, the T cell epitopes are flanked on one or both sides by its natural sequence. In other iterations, the T cell epitopes are linked by the non-natural sequences AAY, RR, and DPP.

[0087] FIG. 2B illustrates evaluation of linker sequences in short cassettes and shows sequence information on the T cell epitopes embedded in the short cassettes. Figure discloses SEQ ID NOS 274-280, respectively, in order of appearance.

[0088] FIG. 3 illustrates evaluation of cellular targeting sequences added to model vaccine cassettes. The targeting cassettes extend the short cassette designs with ubiquitin (Ub), signal peptides (SP) and/or transmembrane (TM) domains, feature next to the five marker human T cell epitopes (epitopes 1 through 5) also two mouse T cell epitopes SIINFEKL (SEQ ID NO: 80) (SII) and SPSYAYHQF (SEQ ID NO: 81) (A5), and use either the non-natural linker AAY- or natural linkers flanking the T cell epitopes on both sides (25mer).

[0089] FIG. 4A illustrates in vivo evaluation of the impact of epitope position in long 21-mer cassettes and shows the design of long cassettes entails five marker class I epitopes (epitopes 1 through 5) contained in their 25-mer natural sequence (linker=natural flanking sequences), spaced with additional well-known T cell class I epitopes (epitopes 6 through 21) contained in their 25-mer natural sequence, and two universal class II epitopes (MHC-II0, with only the relative position of the class I epitopes varied.

[0090] FIG. 4B illustrates in vivo evaluation of the impact of epitope position in long 21-mer cassettes and shows the sequence information on the T cell epitopes used. Figure discloses SEQ ID NOS 281-301, respectively, in order of appearance.

[0091] FIG. 5A illustrates final cassette design for preclinical IND-enabling studies and shows the design of the final cassettes comprises 20 MHC I epitopes contained in their 25-mer natural sequence (linker=natural flanking sequences), composed of 6 non-human primate (NHP) epitopes, 5 human epitopes, 9 murine epitopes, as well as 2 universal MHC class II epitopes.

[0092] FIG. 5B illustrates final cassette design for preclinical IND-enabling studies and shows the sequence information for the T cell epitopes used that are presented on class I MHC of non-human primate, mouse and human origin, as well as sequences of 2 universal MHC class II epitopes PADRE and Tetanus toxoid. Figure discloses SEQ ID NOS 302-323, respectively, in order of appearance.

[0093] FIG. 6A illustrates ChAdV68.4WTnt.GFP virus production after transfection. HEK293A cells were transfected with ChAdV68.4WTnt.GFP DNA using the calcium phosphate protocol. Viral replication was observed 10 days after transfection and ChAdV68.4WTnt.GFP viral plaques were visualized using light microscopy (40× magnification).

[0094] FIG. 6B illustrates ChAdV68.4WTnt.GFP virus production after transfection. HEK293A cells were transfected with ChAdV68.4WTnt.GFP DNA using the calcium phosphate protocol. Viral replication was observed 10 days after transfection and ChAdV68.4WTnt.GFP viral plaques were visualized using fluorescent microscopy at 40× magnification.

[0095] FIG. 6C illustrates ChAdV68.4WTnt.GFP virus production after transfection. HEK293A cells were transfected with ChAdV68.4WTnt.GFP DNA using the calcium phosphate protocol. Viral replication was observed 10 days after transfection and ChAdV68.4WTnt.GFP viral plaques were visualized using fluorescent microscopy at 100× magnification.

[0096] FIG. 7A illustrates ChAdV68.5WTnt.GFP virus production after transfection. HEK293A cells were transfected with ChAdV68.5WTnt.GFP DNA using the lipofectamine protocol. Viral replication (plaques) was observed 10 days after transfection. A lysate was made and used to reinfect a T25 flask of 293A cells. ChAdV68.5WTnt.GFP viral plaques were visualized and photographed 3 days later using light microscopy (40× magnification)

[0097] FIG. 7B illustrates ChAdV68.5WTnt.GFP virus production after transfection. HEK293A cells were transfected with ChAdV68.5WTnt.GFP DNA using the lipofectamine protocol. Viral replication (plaques) was observed 10 days after transfection. A lysate was made and used to reinfect a T25 flask of 293A cells. ChAdV68.5WTnt.GFP viral plaques were visualized and photographed 3 days later using fluorescent microscopy at 40× magnification.

[0098] FIG. 7C illustrates ChAdV68.5WTnt.GFP virus production after transfection. HEK293A cells were transfected with ChAdV68.5WTnt.GFP DNA using the lipofectamine protocol. Viral replication (plaques) was observed 10 days after transfection. A lysate was made and used to reinfect a T25 flask of 293A cells. ChAdV68.5WTnt.GFP viral plaques were visualized and photographed 3 days later using fluorescent microscopy at 100× magnification.

[0099] FIG. 8 illustrates the viral particle production scheme.

[0100] FIG. 9 illustrates the alphavirus derived VEE self-replicating RNA (srRNA) vector.

[0101] FIG. 10 illustrates in vivo reporter expression after inoculation of C57BL/6J mice with VEE-Luciferase srRNA. Shown are representative images of luciferase signal following immunization of C57BL/6J mice with VEE-Luciferase srRNA (10 ug per mouse, bilateral intramuscular injection, MC3 encapsulated) at various timepoints.

[0102] FIG. 11A illustrates T-cell responses measured 14 days after immunization with VEE srRNA formulated with MC3 LNP in B16-OVA tumor bearing mice. B16-OVA tumor bearing C57BL/6J mice were injected with 10 ug of VEE-Luciferase srRNA (control), VEE-UbAAY srRNA (Vax), VEE-Luciferase srRNA and anti-CTLA-4 (aCTLA-4) or VEE-UbAAY srRNA and anti-CTLA-4 (Vax+aCTLA-4). In addition, all mice were treated with anti-PD1 mAb starting at day 7. Each group consisted of 8 mice. Mice were sacrificed and spleens and lymph nodes were collected 14 days after immunization. SIINFEKL (SEQ ID NO: 82)-specific T-cell responses were assessed by IFN-gamma ELISPOT and are reported as spot-forming cells (SFC) per 106 splenocytes. Lines represent medians.

[0103] FIG. 11B illustrates T-cell responses measured 14 days after immunization with VEE srRNA formulated with MC3 LNP in B16-OVA tumor bearing mice. B16-OVA tumor bearing C57BL/6J mice were injected with 10 ug of VEE-Luciferase srRNA (control), VEE-UbAAY srRNA (Vax), VEE-Luciferase srRNA and anti-CTLA-4 (aCTLA-4) or VEE-UbAAY srRNA and anti-CTLA-4 (Vax+aCTLA-4). In addition, all mice were treated with anti-PD1 mAb starting at day 7. Each group consisted of 8 mice. Mice were sacrificed and spleens and lymph nodes were collected 14 days after immunization. SIINFEKL (SEQ ID NO: 83)-specific T-cell responses were assessed by MHCI-pentamer staining, reported as pentamer positive cells as a percent of CD8 positive cells. Lines represent medians.

[0104] FIG. 12A illustrates antigen-specific T-cell responses following heterologous prime/boost in B16-OVA tumor bearing mice. B16-OVA tumor bearing C57BL/6J mice were injected with adenovirus expressing GFP (Ad5-GFP) and boosted with VEE-Luciferase srRNA formulated with MC3 LNP (Control) or Ad5-UbAAY and boosted with VEE-UbAAY srRNA (Vax). Both the Control and Vax groups were also treated with an IgG control mAb. A third group was treated with the Ad5-GFP prime/VEE-Luciferase srRNA boost in combination with anti-CTLA-4 (aCTLA-4), while the fourth group was treated with the Ad5-UbAAY prime/VEE-UbAAY boost in combination with anti-CTLA-4 (Vax+aCTLA-4). In addition, all mice were treated with anti-PD-1 mAb starting at day 21. T-cell responses were measured by IFN-gamma ELISPOT. Mice were sacrificed and spleens and lymph nodes collected at 14 days post immunization with adenovirus.

[0105] FIG. 12B illustrates antigen-specific T-cell responses following heterologous prime/boost in B16-OVA tumor bearing mice. B16-OVA tumor bearing C57BL/6J mice were injected with adenovirus expressing GFP (Ad5-GFP) and boosted with VEE-Luciferase srRNA formulated with MC3 LNP (Control) or Ad5-UbAAY and boosted with VEE-UbAAY srRNA (Vax). Both the Control and Vax groups were also treated with an IgG control mAb. A third group was treated with the Ad5-GFP prime/VEE-Luciferase srRNA boost in combination with anti-CTLA-4 (aCTLA-4), while the fourth group was treated with the Ad5-UbAAY prime/VEE-UbAAY boost in combination with anti-CTLA-4 (Vax+aCTLA-4). In addition, all mice were treated with anti-PD-1 mAb starting at day 21. T-cell responses were measured by IFN-gamma ELISPOT. Mice were sacrificed and spleens and lymph nodes collected at 14 days post immunization with adenovirus and 14 days post boost with srRNA (day 28 after prime).

[0106] FIG. 12C illustrates antigen-specific T-cell responses following heterologous prime/boost in B16-OVA tumor bearing mice. B16-OVA tumor bearing C57BL/6J mice were injected with adenovirus expressing GFP (Ad5-GFP) and boosted with VEE-Luciferase srRNA formulated with MC3 LNP (Control) or Ad5-UbAAY and boosted with VEE-UbAAY srRNA (Vax). Both the Control and Vax groups were also treated with an IgG control mAb. A third group was treated with the Ad5-GFP prime/VEE-Luciferase srRNA boost in combination with anti-CTLA-4 (aCTLA-4), while the fourth group was treated with the Ad5-UbAAY prime/VEE-UbAAY boost in combination with anti-CTLA-4 (Vax+aCTLA-4). In addition, all mice were treated with anti-PD-1 mAb starting at day 21. T-cell responses were measured by MHC class I pentamer staining. Mice were sacrificed and spleens and lymph nodes collected at 14 days post immunization with adenovirus.

[0107] FIG. 12D illustrates antigen-specific T-cell responses following heterologous prime/boost in B16-OVA tumor bearing mice. B16-OVA tumor bearing C57BL/6J mice were injected with adenovirus expressing GFP (Ad5-GFP) and boosted with VEE-Luciferase srRNA formulated with MC3 LNP (Control) or Ad5-UbAAY and boosted with VEE-UbAAY srRNA (Vax). Both the Control and Vax groups were also treated with an IgG control mAb. A third group was treated with the Ad5-GFP prime/VEE-Luciferase srRNA boost in combination with anti-CTLA-4 (aCTLA-4), while the fourth group was treated with the Ad5-UbAAY prime/VEE-UbAAY boost in combination with anti-CTLA-4 (Vax+aCTLA-4). In addition, all mice were treated with anti-PD-1 mAb starting at day 21. T-cell responses were measured by MHC class I pentamer staining. Mice were sacrificed and spleens and lymph nodes collected at 14 days post immunization with adenovirus and 14 days post boost with srRNA (day 28 after prime).

[0108] FIG. 13A illustrates antigen-specific T-cell responses following heterologous prime/boost in CT26 (Balb/c) tumor bearing mice. Mice were immunized with Ad5-GFP and boosted 15 days after the adenovirus prime with VEE-Luciferase srRNA formulated with MC3 LNP (Control) or primed with Ad5-UbAAY and boosted with VEE-UbAAY srRNA (Vax). Both the Control and Vax groups were also treated with an IgG control mAb. A separate group was administered the Ad5-GFP/VEE-Luciferase srRNA prime/boost in combination with anti-PD-1 (aPD1), while a fourth group received the Ad5-UbAAYNEE-UbAAY srRNA prime/boost in combination with an anti-PD-1 mAb (Vax+aPD1). T-cell responses to the AH1 peptide were measured using IFN-gamma ELISPOT. Mice were sacrificed and spleens and lymph nodes collected at 12 days post immunization with adenovirus.

[0109] FIG. 13B illustrates antigen-specific T-cell responses following heterologous prime/boost in CT26 (Balb/c) tumor bearing mice. Mice were immunized with Ad5-GFP and boosted 15 days after the adenovirus prime with VEE-Luciferase srRNA formulated with MC3 LNP (Control) or primed with Ad5-UbAAY and boosted with VEE-UbAAY srRNA (Vax). Both the Control and Vax groups were also treated with an IgG control mAb. A separate group was administered the Ad5-GFP/VEE-Luciferase srRNA prime/boost in combination with anti-PD-1 (aPD1), while a fourth group received the Ad5-UbAAYNEE-UbAAY srRNA prime/boost in combination with an anti-PD-1 mAb (Vax+aPD1). T-cell responses to the AH1 peptide were measured using IFN-gamma ELISPOT. Mice were sacrificed and spleens and lymph nodes collected at 12 days post immunization with adenovirus and 6 days post boost with srRNA (day 21 after prime).

[0110] FIG. 14 illustrates ChAdV68 eliciting T-Cell responses to mouse tumor antigens in mice. Mice were immunized with ChAdV68.5WTnt.MAG25mer, and T-cell responses to the MHC class I epitope SIINFEKL (SEQ ID NO: 84) (OVA) were measured in C57BL/6J female mice and the MHC class I epitope AH1-A5 measured in Balb/c mice. Mean spot forming cells (SFCs) per 10⁶ splenocytes measured in ELISpot assays presented. Error bars represent standard deviation.

[0111] FIGS. 15A, 15B, 15C and 15D illustrate antigen-specific cellular immune responses measured using ELISpot. Antigen-specific IFN-gamma production to six different mamu A01 restricted epitopes was measured in PBMCs for the VEE-MAG25mer srRNA-LNP1 (30 μg) (FIG. 15A), VEE-MAG25mer srRNA-LNP1 (100 μg) (FIG. 15B), or VEE-MAG25mer srRNA-LNP2 (100 μg) (FIG. 15C) homologous prime/boost or the ChAdV68.5WTnt.MAG25mer/VEE-MAG25mer srRNA heterologous prime/boost group (FIG. 15D) using ELISpot 1, 2, 3, 4, 5, 6, 8, 9, or 10 weeks after the first boost immunization (6 rhesus macaques per group). Results are presented as mean spot forming cells (SFC) per 10⁶ PBMCs for each epitope in a stacked bar graph format. Values for each animal were normalized to the levels at pre-bleed (week 0).

[0112] FIG. 16 shows antigen-specific cellular immune response measured using ELISpot. Antigen-specific IFN-gamma production to six different mamu A01 restricted epitopes was measured in PBMCs after immunization with the ChAdV68.5WTnt.MAG25mer/VEE-MAG25mer srRNA heterologous prime/boost regimen using ELISpot prior to immunization and 4, 5, 6, 7, 8, 10, 11, 12, 13, 14, 15, 16, 17, 18, 19, 20, 21, 22, 23 or 24 weeks after the initial immunization. Results are presented as mean spot forming cells (SFC) per 10⁶ PBMCs for each epitope (6 rhesus macaques per group) in a stacked bar graph format.

[0113] FIG. 17 shows antigen-specific cellular immune response measured using ELISpot. Antigen-specific IFN-gamma production to six different mamu A01 restricted epitopes was measured in PBMCs after immunization with the VEE-MAG25mer srRNA LNP2 homologous prime/boost regimen using ELISpot prior to immunization and 4, 5, 6, 7, 8, 10, 11, 12, 13, 14, or 15 weeks after the initial immunization. Results are presented as mean spot forming cells (SFC) per 10⁶ PBMCs for each epitope (6 rhesus macaques per group) in a stacked bar graph format.

[0114] FIG. 18 shows antigen-specific cellular immune response measured using ELISpot. Antigen-specific IFN-gamma production to six different mamu A01 restricted epitopes was measured in PBMCs after immunization with the VEE-MAG25mer srRNA LNP1 homologous prime/boost regimen using ELISpot prior to immunization and 4, 5, 6, 7, 8, 10, 11, 12, 13, 14, or 15 weeks after the initial immunization. Results are presented as mean spot forming cells (SFC) per 10⁶ PBMCs for each epitope (6 rhesus macaques per group) in a stacked bar graph format.

[0115] FIG. 19A and FIG. 19B show example peptide spectrums generated from Promega's dynamic range standard. Figure discloses SEQ ID NO: 324.

[0116] FIG. 20 illustrates the general TCR sequencing strategy and workflow.

[0117] FIG. 21 illustrates the general organization of the model epitopes from the various species for large antigen cassettes that had either 30 (L), 40 (XL) or 50 (XXL) epitopes.

[0118] FIG. 22 shows ChAd vectors express long cassettes as indicated by the above Western blot using an anti-class II (PADRE) antibody that recognizes a sequence common to all cassettes. HEK293 cells were infected with chAd68 vectors expressing large cassettes (chAd68-50XXL, chAd68-40XL & chAd68-30L) of variable size. Infections were set up at a MOI of 0.2. Twenty-four hours post infection MG132 a proteasome inhibitor was added to a set of the infected wells (indicated by the plus sign). Another set of virus treated wells were not treated with MG132 (indicated by minus sign). Uninfected HEK293 cells (293F) were used as a negative control. Forty-eight hours post infection cell pellets were harvested and analyzed by SDS/PAGE electrophoresis, and immunoblotting using a rabbit anti-Class II PADRE antibody. A HRP anti-rabbit antibody and ECL chemiluminescent substrate was used for detection.

[0119] FIG. 23 shows CD8+ immune responses in chAd68 large cassette immunized mice, detected against AH1 (top) and SIINFEKL (SEQ ID NO: 85) (bottom) by ICS. Data is presented as IFNg+ cells against the model epitope as % of total CD8 cells

[0120] FIG. 24 shows CD8+ responses to LD-AH1+(top) and Kb-SIINFEKL+(SEQ ID NO: 86) (bottom) Tetramers post chAd68 large cassette vaccination. Data is presented as % of total CD8 cells reactive against the model Tetramer peptide complex. *p<0.05, **p<0.01 by ANOVA with Tukey's test. All p-values compared to MAG 20-antigen cassette.

[0121] FIG. 25 shows CD8+ immune responses in alphavirus large cassette treated mice, detected against AH1 (top) and SIINFEKL (SEQ ID NO: 87) ((bottom) by ICS. Data is presented as IFNg+ cells against the model epitope as % of total CD8 cells. *p<0.05, **p<0.01, ***p<0.001 by ANOVA with Tukey's test. All p-values compared to MAG 20-antigen cassette.

[0122] FIG. 26 illustrates the vaccination strategy used to evaluate immunogenicity of the antigen-cassette containing vectors in rhesus macaques. Triangles indicate chAd68 vaccination (1e12 vp/animal) at weeks 0 & 32. Circles represent alphavirus vaccination at weeks 0, 4, 12, 20, 28 & 32. Squares represent administration of an anti-CTLA4 antibody.

[0123] FIG. 27 shows a time course of CD8+ anti-epitope responses in Rhesus Macaques dosed with chAd-MAG alone (Group 4). Mean SFC/1e6 splenocytes is shown.

[0124] FIG. 28 shows a time course of CD8+ anti-epitope responses in Rhesus Macaques dosed with chAd-MAG plus anti-CTLA4 antibody (Ipilimumab) delivered IV. (Group 5). Mean SFC/1e6 splenocytes is shown.

[0125] FIG. 29 shows a time course of CD8+ anti-epitope responses in Rhesus Macaques dosed with chAd-MAG plus anti-CTLA4 antibody (Ipilimumab) delivered SC (Group 6). Mean SFC/1e6 splenocytes is shown.

[0126] FIG. 30 shows antigen-specific memory responses generated by ChAdV68/samRNA vaccine protocol measured by ELISpot. Results are presented as individual dot plots, with each dot representing a single animal. Pre-immunization baseline (left panel) and memory response at 18 months post-prime (right panel) are shown.

[0127] FIG. 31 shows memory cell phenotyping of antigen-specific CD8+ T-cells by flow cytometry using combinatorial tetramer staining and CD45RA/CCR7 co-staining.

[0128] FIG. 32 shows the distribution of memory cell types within the sum of the four Mamu-A*01 tetramer+ CD8+ T-cell populations at study month 18. Memory cells were characterized as follows: CD45RA+CCR7+=naïve, CD45RA+CCR7−=effector (Teff), CD45RA−CCR7+=central memory (Tcm), CD45RA−CCR7−=effector memory (Tem).

[0129] FIG. 33 shows frequency of CD8+ T cells recognizing the CT26 tumor antigen AH1 in CT26 tumor-bearing mice. P values determined using the one-way ANOVA with Tukey's multiple comparisons test; **P<0.001, *P<0.05. ChAdV=ChAdV68.5WTnt.MAG25mer; aCTLA4=anti-CTLA4 antibody, clone 9D9.

[0130] FIG. 34 depicts a flow process for providing an antigen-based vaccine to the subject, in accordance with one embodiment.

[0131] FIG. 35 depicts a flow process for providing an antigen-based vaccine to the subject, in accordance with a second embodiment.

[0132] FIG. 36 depicts the predictive capacity of the EDGE model in comparison to a public prediction tool for predicting HIV epitopes that are presented by class I HLA alleles.

### DETAILED DESCRIPTION

### I. Definitions

[0133] In general, terms used in the claims and the specification are intended to be construed as having the plain meaning understood by a person of ordinary skill in the art. Certain terms are defined below to provide additional clarity. In case of conflict between the plain meaning and the provided definitions, the provided definitions are to be used.

[0134] As used herein the term “antigen” is a substance that induces an immune response.

[0135] As used herein the term “antigen-based vaccine” is a vaccine composition based on one or more antigens, e.g., a plurality of antigens. The vaccines can be nucleotide-based (e.g., virally based, RNA based, or DNA based), protein-based (e.g., peptide based), or a combination thereof.

[0136] As used herein the term “candidate antigen” refers to an antigen selected for inclusion in an antigen-based vaccine.

[0137] As used herein the term “candidate epitope sequence” refers to an epitope sequence on a candidate antigen selected for inclusion in an antigen-based vaccine.

[0138] As used herein the term “coding region” is the portion(s) of a gene that encode protein.

[0139] As used herein, the term percent “identity,” in the context of two or more nucleic acid or polypeptide sequences, refer to two or more sequences or subsequences that have a specified percentage of nucleotides or amino acid residues that are the same, when compared and aligned for maximum correspondence, as measured using one of the sequence comparison algorithms described below (e.g., BLASTP and BLASTN or other algorithms available to persons of skill) or by visual inspection. Depending on the application, the percent “identity” can exist over a region of the sequence being compared, e.g., over a functional domain, or, alternatively, exist over the full length of the two sequences to be compared.

[0140] For sequence comparison, typically one sequence acts as a reference sequence to which test sequences are compared. When using a sequence comparison algorithm, test and reference sequences are input into a computer, subsequence coordinates are designated, if necessary, and sequence algorithm program parameters are designated. The sequence comparison algorithm then calculates the percent sequence identity for the test sequence(s) relative to the reference sequence, based on the designated program parameters. Alternatively, sequence similarity or dissimilarity can be established by the combined presence or absence of particular nucleotides, or, for translated sequences, amino acids at selected sequence positions (e.g., sequence motifs).

[0141] Optimal alignment of sequences for comparison can be conducted, e.g., by the local homology algorithm of Smith & Waterman, Adv. Appl. Math. 2:482 (1981), by the homology alignment algorithm of Needleman & Wunsch, J. Mol. Biol. 48:443 (1970), by the search for similarity method of Pearson & Lipman, Proc. Nat'l. Acad. Sci. USA 85:2444 (1988), by computerized implementations of these algorithms (GAP, BESTFIT, FASTA, and TFASTA in the Wisconsin Genetics Software Package, Genetics Computer Group, 575 Science Dr., Madison, Wis.), or by visual inspection (see generally Ausubel et al., infra).

[0142] One example of an algorithm that is suitable for determining percent sequence identity and sequence similarity is the BLAST algorithm, which is described in Altschul et al., J. Mol. Biol. 215:403-410 (1990). Software for performing BLAST analyses is publicly available through the National Center for Biotechnology Information.

[0143] As used herein the term “epitope” is the specific portion of an antigen typically bound by an antibody or T cell receptor.

[0144] As used herein the term “immunogenic” is the ability to elicit an immune response, e.g., via T cells, B cells, or both.

[0145] As used herein the term “HLA binding affinity” “MHC binding affinity” means affinity of binding between a specific antigen and a specific HLA or MHC allele.

[0146] As used herein the term “variant” is a difference between a subject's nucleic acids and the reference human genome used as a control.

[0147] As used herein the term “variant call” is an algorithmic determination of the presence of a variant, typically from sequencing.

[0148] As used herein the term “polymorphism” is a germline variant, i.e., a variant found in all DNA-bearing cells of an individual.

[0149] As used herein the term “somatic variant” is a variant arising in non-germline cells of an individual.

[0150] As used herein the term “allele” is a version of a gene or a version of a genetic sequence or a version of a protein.

[0151] As used herein the term “HLA type” is the complement of HLA gene alleles.

[0152] As used herein the term “exome” is a subset of the genome that codes for proteins. An exome can be the collective exons of a genome.

[0153] As used herein the term “logistic regression” is a regression model for binary data from statistics where the logit of the probability that the dependent variable is equal to one is modeled as a linear function of the dependent variables.

[0154] As used herein the term “neural network” is a machine learning model for classification or regression consisting of multiple layers of linear transformations followed by element-wise nonlinearities typically trained via stochastic gradient descent and back-propagation.

[0155] As used herein the term “proteome” is the set of all proteins expressed and/or translated by a cell, group of cells, or individual.

[0156] As used herein the term “peptidome” is the set of all peptides presented by MHC-I or MHC-II on the cell surface. The peptidome may refer to a property of a cell or a collection of cells.

[0157] As used herein the term “ELISPOT” means Enzyme-linked immunosorbent spot assay—which is a common method for monitoring immune responses in humans and animals.

[0158] As used herein the term “dextramers” is a dextran-based peptide-MHC multimers used for antigen-specific T-cell staining in flow cytometry.

[0159] As used herein the term “tolerance or immune tolerance” is a state of immune non-responsiveness to one or more antigens, e.g. self-antigens.

[0160] As used herein the term “central tolerance” is a tolerance affected in the thymus, either by deleting self-reactive T-cell clones or by promoting self-reactive T-cell clones to differentiate into immunosuppressive regulatory T-cells (Tregs).

[0161] As used herein the term “peripheral tolerance” is a tolerance affected in the periphery by downregulating or anergizing self-reactive T-cells that survive central tolerance or promoting these T cells to differentiate into Tregs.

[0162] The term “sample” can include a single cell or multiple cells or fragments of cells or an aliquot of body fluid, taken from a subject, by means including venipuncture, excretion, ejaculation, massage, biopsy, needle aspirate, lavage sample, scraping, surgical incision, or intervention or other means known in the art.

[0163] The term “subject” encompasses a cell, tissue, or organism, human or non-human, whether in vivo, ex vivo, or in vitro, male or female. The term subject is inclusive of mammals including humans.

[0164] The term “mammal” encompasses both humans and non-humans and includes but is not limited to humans, non-human primates, canines, felines, murines, bovines, equines, and porcines.

[0165] The term “clinical factor” refers to a measure of a condition of a subject, e.g., disease activity or severity. “Clinical factor” encompasses all markers of a subject's health status, including non-sample markers, and/or other characteristics of a subject, such as, without limitation, age and gender. A clinical factor can be a score, a value, or a set of values that can be obtained from evaluation of a sample (or population of samples) from a subject or a subject under a determined condition. A clinical factor can also be predicted by markers and/or other parameters such as gene expression surrogates. Clinical factors can include past indications (e.g., patient history) and smoking history.

[0166] The term “alphavirus” refers to members of the family Togaviridae, and are positive-sense single-stranded RNA viruses. Alphaviruses are typically classified as either Old World, such as Sindbis, Ross River, Mayaro, Chikungunya, and Semliki Forest viruses, or New World, such as eastern equine encephalitis, Aura, Fort Morgan, or Venezuelan equine encephalitis and its derivative strain TC-83. Alphaviruses are typically self-replicating RNA viruses.

[0167] The term “alphavirus backbone” refers to minimal sequence(s) of an alphavirus that allow for self-replication of the viral genome. Minimal sequences can include conserved sequences for nonstructural protein-mediated amplification, a nonstructural protein 1 (nsP1) gene, a nsP2 gene, a nsP3 gene, a nsP4 gene, and a polyA sequence, as well as sequences for expression of subgenomic viral RNA including a 26S promoter element.

[0168] The term “sequences for nonstructural protein-mediated amplification” includes alphavirus conserved sequence elements (CSE) well known to those in the art. CSEs include, but are not limited to, an alphavirus 5′ UTR, a 51-nt CSE, a 24-nt CSE, or other 26S subgenomic promoter sequence, a 19-nt CSE, and an alphavirus 3′ UTR.

[0169] The term “RNA polymerase” includes polymerases that catalyze the production of RNA polynucleotides from a DNA template. RNA polymerases include, but are not limited to, bacteriophage derived polymerases including T3, T7, and SP6.

[0170] The term “lipid” includes hydrophobic and/or amphiphilic molecules. Lipids can be cationic, anionic, or neutral. Lipids can be synthetic or naturally derived, and in some instances biodegradable. Lipids can include cholesterol, phospholipids, lipid conjugates including, but not limited to, polyethyleneglycol (PEG) conjugates (PEGylated lipids), waxes, oils, glycerides, fats, and fat-soluble vitamins. Lipids can also include dilinoleylmethyl-4-dimethylaminobutyrate (MC3) and MC3-like molecules.

[0171] The term “lipid nanoparticle” or “LNP” includes vesicle like structures formed using a lipid containing membrane surrounding an aqueous interior, also referred to as liposomes. Lipid nanoparticles includes lipid-based compositions with a solid lipid core stabilized by a surfactant. The core lipids can be fatty acids, acylglycerols, waxes, and mixtures of these surfactants. Biological membrane lipids such as phospholipids, sphingomyelins, bile salts (sodium taurocholate), and sterols (cholesterol) can be utilized as stabilizers. Lipid nanoparticles can be formed using defined ratios of different lipid molecules, including, but not limited to, defined ratios of one or more cationic, anionic, or neutral lipids. Lipid nanoparticles can encapsulate molecules within an outer-membrane shell and subsequently can be contacted with target cells to deliver the encapsulated molecules to the host cell cytosol. Lipid nanoparticles can be modified or functionalized with non-lipid molecules, including on their surface. Lipid nanoparticles can be single-layered (unilamellar) or multi-layered (multilamellar). Lipid nanoparticles can be complexed with nucleic acid. Unilamellar lipid nanoparticles can be complexed with nucleic acid, wherein the nucleic acid is in the aqueous interior. Multilamellar lipid nanoparticles can be complexed with nucleic acid, wherein the nucleic acid is in the aqueous interior, or to form or sandwiched between

[0172] Abbreviations: MHC: major histocompatibility complex; HLA: human leukocyte antigen, or the human MHC gene locus; NGS: next-generation sequencing; PPV: positive predictive value; FFPE: formalin-fixed, paraffin-embedded; NMD: nonsense-mediated decay; DC: dendritic cell.

[0173] It should be noted that, as used in the specification and the appended claims, the singular forms “a,” “an,” and “the” include plural referents unless the context clearly dictates otherwise.

[0174] Unless specifically stated or otherwise apparent from context, as used herein the term “about” is understood as within a range of normal tolerance in the art, for example within 2 standard deviations of the mean. About can be understood as within 10%, 9%, 8%, 7%, 6%, 5%, 4%, 3%, 2%, 1%, 0.5%, 0.1%, 0.05%, or 0.01% of the stated value. Unless otherwise clear from context, all numerical values provided herein are modified by the term about.

[0175] Any terms not directly defined herein shall be understood to have the meanings commonly associated with them as understood within the art of the invention. Certain terms are discussed herein to provide additional guidance to the practitioner in describing the compositions, devices, methods and the like of aspects of the invention, and how to make or use them. It will be appreciated that the same thing may be said in more than one way. Consequently, alternative language and synonyms may be used for any one or more of the terms discussed herein. No significance is to be placed upon whether or not a term is elaborated or discussed herein. Some synonyms or substitutable methods, materials and the like are provided. Recital of one or a few synonyms or equivalents does not exclude use of other synonyms or equivalents, unless it is explicitly stated. Use of examples, including examples of terms, is for illustrative purposes only and does not limit the scope and meaning of the aspects of the invention herein.

[0176] All references, issued patents and patent applications cited within the body of the specification are hereby incorporated by reference in their entirety, for all purposes.

### II. Methods of Identifying Antigens

[0177] Methods disclosed herein describe identifying candidate antigens for inclusion in a personalized antigen-based vaccine. Candidate antigens represent antigens of an infectious disease, such as HIV, that are likely to be presented on the cell surface of immune cells, including professional antigen presenting cells such as dendritic cells, and/or are likely to be immunogenic, for a particular subject.

[0178] As an example, one such method may comprise the steps of: obtaining HIV sequencing data, wherein the HIV sequencing data is used to obtain data representing peptide sequences of each of a set of antigens; inputting the peptide sequence of each antigen into one or more presentation models to generate a set of numerical likelihoods that each of the antigens is presented by one or more MHC proteins of the subject, the set of numerical likelihoods having been identified at least based on received mass spectrometry data; and selecting a subset of the set of antigens based on the set of numerical likelihoods to generate a set of selected antigens. In one aspect, each antigen in the set of antigens is encoded by coding regions in genes in the HIV genome (e.g., env, gag, Negative factor (nef), pol, rev, trans-activator of transcription (Tat), viral infectivity factor (vif), viral protein r (vir), or viral protein u (viu)).

[0179] The presentation model can comprise a statistical regression or a machine learning (e.g., deep learning) model trained on a set of reference data (also referred to as a training data set) comprising a set of corresponding labels, wherein the set of reference data is obtained from each of a plurality of distinct subjects where optionally some subjects are infected with HIV. The reference data can further comprise mass spectrometry data, sequencing data, RNA sequencing data, expression profiling data, and proteomics data for single-allele cell lines engineered to express a predetermined MHC allele that are subsequently exposed to synthetic protein, normal human cell lines, and fresh and frozen primary samples, and T cell assays (e.g., ELISPOT). In certain aspects, the set of reference data includes each form of reference data.

[0180] The presentation model can comprise a set of features derived at least in part from the set of reference data, and wherein the set of features comprises at least one of allele dependent-features and allele-independent features. In certain aspects each feature is included.

[0181] Methods for identifying candidate antigens also include generating an output for constructing a personalized antigen-based vaccine by identifying one or more antigens of HIV that are likely to be presented. As an example, one such method may comprise the steps of: obtaining HIV sequencing data, wherein the HIV sequencing data is used to obtain data representing peptide sequences of each of a set of antigens; encoding the peptide sequences of each of the antigens into a corresponding numerical vector, each numerical vector including information regarding a plurality of amino acids that make up the peptide sequence and a set of positions of the amino acids in the peptide sequence; inputting the numerical vectors, using a computer processor, into a deep learning presentation model to generate a set of presentation likelihoods for the set of antigens, each presentation likelihood in the set representing the likelihood that a corresponding antigen is presented by MHC proteins of class I MHC alleles; selecting a subset of the set of antigens based on the set of presentation likelihoods to generate a set of selected antigens; and generating the output for constructing the personalized antigen-based vaccine based on the set of selected antigens. In one aspect, each antigen in the set of antigens is encoded by genes in the HIV genome (e.g., env, gag, nef, pol, rev, tat, vif, vir, or viu).

[0182] Specific methods for identifying antigens are known to those skilled in the art, for example the methods described in more detail in international patent application publications WO/2017/106638, WO/2018/195357, and WO/2018/208856, each herein incorporated by reference, in their entirety, for all purposes.

[0183] A method of treating a subject is disclosed herein, comprising performing the steps of any of the antigen identification methods described herein, and further comprising obtaining an antigen-based vaccine comprising the set of selected antigens, and administering the antigen-based vaccine to the subject, wherein, optionally, the subject has HIV.

[0184] A method disclosed herein can also include identifying one or more T cells that are antigen-specific for at least one of the antigens in the subset. In some embodiments, the identification comprises co-culturing the one or more T cells with one or more of the antigens in the subset under conditions that expand the one or more antigen-specific T cells. In further embodiments, the identification comprises contacting the one or more T cells with a tetramer comprising one or more of the antigens in the subset under conditions that allow binding between the T cell and the tetramer. In even further embodiments, the method disclosed herein can also include identifying one or more T cell receptors (TCR) of the one or more identified T cells. In certain embodiments, identifying the one or more T cell receptors comprises sequencing the T cell receptor sequences of the one or more identified T cells. The method disclosed herein can further comprise genetically engineering a plurality of T cells to express at least one of the one or more identified T cell receptors; culturing the plurality of T cells under conditions that expand the plurality of T cells; and infusing the expanded T cells into the subject. In some embodiments, genetically engineering the plurality of T cells to express at least one of the one or more identified T cell receptors comprises cloning the T cell receptor sequences of the one or more identified T cells into an expression vector; and transfecting each of the plurality of T cells with the expression vector. In some embodiments, the method disclosed herein further comprises culturing the one or more identified T cells under conditions that expand the one or more identified T cells; and infusing the expanded T cells into the subject.

[0185] Also disclosed herein is an isolated T cell that is antigen-specific for at least one selected antigen in the subset.

[0186] Also disclosed herein is a method for manufacturing a HIV vaccine, comprising the steps of: obtaining HIV sequencing data, wherein the HIV sequencing data is used to obtain data representing peptide sequences of each of a set of antigens; inputting the peptide sequence of each antigen into one or more presentation models to generate a set of numerical likelihoods that each of the antigens is presented by one or more MHC alleles, the set of numerical likelihoods having been identified at least based on received mass spectrometry data; and selecting a subset of the set of antigens based on the set of numerical likelihoods to generate a set of selected antigens; and producing or having produced a HIV vaccine comprising the set of selected antigens. In one aspect, each antigen in the set of antigens is encoded by genes in the HIV genome (e.g., env, gag, nef, pol, rev, tat, vif, vir, or viu).

[0187] Also disclosed herein is an antigen-based vaccine including a set of selected antigens selected by performing the method comprising the steps of: obtaining HIV sequencing data, wherein the HIV sequencing data is used to obtain data representing peptide sequences of each of a set of antigens; inputting the peptide sequence of each antigen into one or more presentation models to generate a set of numerical likelihoods that each of the antigens is presented by one or more MHC alleles, the set of numerical likelihoods having been identified at least based on received mass spectrometry data; and selecting a subset of the set of antigens based on the set of numerical likelihoods to generate a set of selected antigens; and producing or having produced a HIV vaccine comprising the set of selected antigens. In one aspect, each antigen in the set of antigens is encoded by genes in the HIV genome (e.g., env, gag, nef, pol, rev, tat, vif, vir, or viu).

[0188] The antigen-based vaccine may include one or more of a nucleotide sequence, a polypeptide sequence, RNA, DNA, a cell, a plasmid, or a vector.

[0189] The antigen-based vaccine may include one or more antigens that is immunogenic in the subject.

[0190] The antigen-based vaccine may not include one or more antigens that induce an autoimmune response against normal tissue in the subject.

[0191] The antigen-based vaccine may include an adjuvant.

[0192] The antigen-based vaccine may include an excipient.

[0193] A method disclosed herein may also include selecting antigens that have an increased likelihood of being presented by immune cells of the subject relative to unselected antigens based on the presentation model.

[0194] A method disclosed herein may also include selecting antigens that have an increased likelihood of being capable of being presented to naïve T cells by professional antigen presenting cells (APCs) relative to unselected antigens based on the presentation model, optionally wherein the APC is a dendritic cell (DC).

[0195] A method disclosed herein may also include selecting antigens that have an increased likelihood of being capable of inducing a HIV-specific immune response in the subject relative to unselected antigens based on the presentation model.

[0196] A method disclosed herein may also include selecting antigens that have a decreased likelihood of being subject to inhibition via central or peripheral tolerance relative to unselected antigens based on the presentation model.

[0197] A method disclosed herein may also include selecting antigens that have a decreased likelihood of being capable of inducing an autoimmune response to normal tissue in the subject relative to unselected antigens based on the presentation model.

[0198] The exome or transcriptome nucleotide sequencing and/or expression data may be obtained by performing sequencing on the tissue.

[0199] The sequencing may be next generation sequencing (NGS) or any massively parallel sequencing approach.

[0200] The set of numerical likelihoods may be further identified by at least MHC-allele interacting features comprising at least one of: the predicted affinity with which the MHC allele and the antigen encoded peptide bind; the predicted stability of the antigen encoded peptide-MHC complex; the sequence and length of the antigen encoded peptide; the probability of presentation of antigen encoded peptides with similar sequence in cells from other individuals expressing the particular MHC allele as assessed by mass-spectrometry proteomics or other means; the expression levels of the particular MHC allele in the subject in question (e.g. as measured by RNA-seq or mass spectrometry); the overall antigen encoded peptide-sequence-independent probability of presentation by the particular MHC allele in other distinct subjects who express the particular MHC allele; the overall antigen encoded peptide-sequence-independent probability of presentation by MHC alleles in the same family of molecules (e.g., HLA-A, HLA-B, HLA-C, HLA-DQ, HLA-DR, HLA-DP) in other distinct subjects.

[0201] The set of numerical likelihoods are further identified by at least MHC-allele noninteracting features comprising at least one of: the C- and N-terminal sequences flanking the antigen encoded peptide within its source protein sequence; the presence of protease cleavage motifs in the antigen encoded peptide, optionally weighted according to the expression of corresponding proteases in tissue (as measured by RNA-seq or mass spectrometry); the turnover rate of the source protein as measured in the appropriate cell type; the length of the source protein, the level of expression of proteasome, immunoproteasome, thymoproteasome, or other proteases (which may be measured by RNA-seq, proteome mass spectrometry, or immunohistochemistry); the expression of the source gene (e.g., env, gag, nef, pol, rev, tat, vif, vir, or viu) of the antigen encoded peptide (e.g., as measured by RNA-seq or mass spectrometry); features describing the properties of the domain of the source protein containing the peptide, for example: secondary or tertiary structure (e.g., alpha helix vs beta sheet); alternative splicing; the probability of presentation of peptides from the source protein of the antigen encoded peptide in question in other distinct subjects; the probability that the peptide will not be detected or over-represented by mass spectrometry due to technical biases; the expression of various gene modules/pathways as measured by RNASeq (which need not contain the source protein of the peptide) that are informative about the state of the immune cells; the probability that the peptide binds to the TAP or the measured or predicted binding affinity of the peptide to the TAP; the expression level of TAP (which may be measured by RNA-seq, proteome mass spectrometry, immunohistochemistry); presence or absence of functional germline polymorphisms, including, but not limited to: in genes encoding the proteins involved in the antigen presentation machinery (e.g., B2M, HLA-A, HLA-B, HLA-C, TAP-1, TAP-2, TAPBP, CALR, CNX, ERP57, HLA-DM, HLA-DMA, HLA-DMB, HLA-DO, HLA-DOA, HLA-DOB, HLA-DP, HLA-DPA1, HLA-DPB1, HLA-DQ, HLA-DQA1, HLA-DQA2, HLA-DQB1, HLA-DQB2, HLA-DR, HLA-DRA, HLA-DRB1, HLA-DRB3, HLA-DRB4, HLA-DRB5 or any of the genes coding for components of the proteasome or immunoproteasome); and HIV subtype (e.g., A1, A2, B, C, D, F1, F2, G, H, J, and K); smoking history.

[0202] A method disclosed herein may also include obtaining an antigen-based vaccine comprising the set of selected antigens or a subset thereof, optionally further comprising administering the antigen-based vaccine to the subject.

[0203] At least one of the antigens in the set of candidate antigens, when in polypeptide form, may include at least one of: a binding affinity with MHC with an IC50 value of less than 1000 nM, for MHC Class I polypeptides a length of 8-15, 8, 9, 10, 11, 12, 13, 14, or 15 amino acids, for MHC Class II polypeptides a length of 6-30, 6, 7, 8, 9, 10, 11, 12, 13, 14, 15, 16, 17, 18, 19, 20, 21, 22, 23, 24, 25, 26, 27, 28, 29, or 30 amino acids, presence of sequence motifs within or near the polypeptide in the parent protein sequence promoting proteasome cleavage, and presence of sequence motifs promoting TAP transport. For MHC Class II, presence of sequence motifs within or near the peptide promoting cleavage by extracellular or lysosomal proteases (e.g., cathepsins) or HLA-DM catalyzed HLA binding.

[0204] A method disclosed herein can also include selecting a subset of antigens, wherein the subset of antigens is selected because each has an increased likelihood that it is presented on the surface of HIV relative to one or more other antigens.

[0205] A method disclosed herein can also include selecting a subset of candidate antigens, In one aspect, the subset of candidate antigens is selected because each has an increased likelihood that it is capable of inducing a HIV-specific immune response in the subject relative to one or more other antigens. In one aspect, the subset of candidate antigens is selected because each has an increased likelihood that it is capable of being presented to naïve T cells by professional antigen presenting cells (APCs) relative to one or more distinct antigens, optionally wherein the APC is a dendritic cell (DC). In one aspect, the subset of candidate antigens is selected because each has a decreased likelihood that it is subject to inhibition via central or peripheral tolerance relative to one or more other antigens. In one aspect, the subset of antigens is selected because each has a decreased likelihood that it is capable of inducing an autoimmune response to normal tissue in the subject relative to one or more other antigens.

[0206] The practice of the methods herein will employ, unless otherwise indicated, conventional methods of protein chemistry, biochemistry, recombinant DNA techniques and pharmacology, within the skill of the art. Such techniques are explained fully in the literature. See, e.g., T. E. Creighton, Proteins: Structures and Molecular Properties (W. H. Freeman and Company, 1993); A. L. Lehninger, Biochemistry (Worth Publishers, Inc., current addition); Sambrook, et al., Molecular Cloning: A Laboratory Manual (2nd Edition, 1989); Methods In Enzymology (S. Colowick and N. Kaplan eds., Academic Press, Inc.); Remington's Pharmaceutical Sciences, 18th Edition (Easton, Pa.: Mack Publishing Company, 1990); Carey and Sundberg Advanced Organic Chemistry 3rd Ed. (Plenum Press) Vols A and B (1992).

### III. Identifying HIV Epitope Sequences

[0207] Also disclosed herein are methods for the identification of HIV epitope sequences. In one aspect, HIV epitope sequences are identified from HIV nucleotide sequences that are sequenced from the HIV genome.

[0208] The HIV nucleotide sequences can be encoded by one of nine HIV genes including env, gag, nef, pol, rev, tat, vif, vpr, and vpu. Sequencing of the HIV genome can be done on a nucleic acid sample obtained from any cell type or tissue. For example, a HIV sample can be obtained from a bodily fluid, e.g., blood, obtained by known techniques (e.g. venipuncture) or saliva.

[0209] HIV nucleotide sequence information can be generated directly from millions of individual molecules of nucleic acids obtained from HIV. Real-time single molecule sequencing-by-synthesis technologies rely on the detection of fluorescent nucleotides as they are incorporated into a nascent strand of DNA that is complementary to the template being sequenced. In one method, oligonucleotides 30-50 bases in length are covalently anchored at the 5′ end to glass cover slips. These anchored strands perform two functions. First, they act as capture sites for the target template strands if the templates are configured with capture tails complementary to the surface-bound oligonucleotides. They also act as primers for the template directed primer extension that forms the basis of the sequence reading. The capture primers function as a fixed position site for sequence determination using multiple cycles of synthesis, detection, and chemical cleavage of the dye-linker to remove the dye. Each cycle consists of adding the polymerase/labeled nucleotide mixture, rinsing, imaging and cleavage of dye. In an alternative method, polymerase is modified with a fluorescent donor molecule and immobilized on a glass slide, while each nucleotide is color-coded with an acceptor fluorescent moiety attached to a gamma-phosphate. The system detects the interaction between a fluorescently-tagged polymerase and a fluorescently modified nucleotide as the nucleotide becomes incorporated into the de novo chain. Other sequencing-by-synthesis technologies also exist.

[0210] Any suitable sequencing-by-synthesis platform can be used to generate HIV nucleic acid sequences. As described above, four major sequencing-by-synthesis platforms are currently available: the Genome Sequencers from Roche/454 Life Sciences, the 1G Analyzer from Illumina/Solexa, the SOLiD system from Applied BioSystems, and the Heliscope system from Helicos Biosciences. Sequencing-by-synthesis platforms have also been described by Pacific BioSciences and VisiGen Biotechnologies. In some embodiments, a plurality of nucleic acid molecules being sequenced is bound to a support (e.g., solid support). To immobilize the nucleic acid on a support, a capture sequence/universal priming site can be added at the 3′ and/or 5′ end of the template. The nucleic acids can be bound to the support by hybridizing the capture sequence to a complementary sequence covalently attached to the support. The capture sequence (also referred to as a universal capture sequence) is a nucleic acid sequence complementary to a sequence attached to a support that may dually serve as a universal primer.

[0211] As an alternative to a capture sequence, a member of a coupling pair (such as, e.g., antibody/antigen, receptor/ligand, or the avidin-biotin pair as described in, e.g., US Patent Application No. 2006/0252077) can be linked to each fragment to be captured on a surface coated with a respective second member of that coupling pair.

[0212] Subsequent to the capture, the sequence can be analyzed, for example, by single molecule detection/sequencing, e.g., as described in the Examples and in U.S. Pat. No. 7,283,337, including template-dependent sequencing-by-synthesis. In sequencing-by-synthesis, the surface-bound molecule is exposed to a plurality of labeled nucleotide triphosphates in the presence of polymerase. The sequence of the template is determined by the order of labeled nucleotides incorporated into the 3′ end of the growing chain. This can be done in real time or can be done in a step-and-repeat mode. For real-time analysis, different optical labels to each nucleotide can be incorporated and multiple lasers can be utilized for stimulation of incorporated nucleotides.

[0213] Sequencing can also include other massively parallel sequencing or next generation sequencing (NGS) techniques and platforms. Additional examples of massively parallel sequencing techniques and platforms are the Illumina HiSeq or MiSeq, Thermo PGM or Proton, the Pac Bio RS II or Sequel, Qiagen's Gene Reader, and the Oxford Nanopore MinION. Additional similar current massively parallel sequencing technologies can be used, as well as future generations of these technologies.

[0214] In some aspects, HIV nucleotide sequences of different HIV categories, types, and subtypes are obtained from available open-source databases (e.g., the Los Alamos National Lab's HIV database).

[0215] Having obtained the HIV nucleotide sequences, HIV epitope sequences are extracted from the HIV nucleotide sequences. As one example, extraction of the HIV epitope sequences can be conducted by employing a sliding window, where length of the sliding window corresponds to the length of a HIV epitope sequence. To illustrate the extraction process, the sliding window is applied to a first HIV nucleotide sequence. The set of nucleotide base sequences in the sliding window is extracted as a first HIV epitope sequence. The sliding window is shifted by one nucleotide base and the next set of nucleotide base sequences in the shifted sliding window is a second HIV epitope sequence. This process repeats until the sliding window has been applied across all HIV nucleotide sequences.

[0216] In one aspect, each HIV epitope sequence is 18, 19, 20, 21, 22, 23, 24, 25, 26, 27, 28, 29, 30, 31, 32, 33, 34, 35, 36, 37, 38, or 39 nucleotide bases in length (e.g., 6-13 amino acid sequences in length). In one aspect, each HIV epitope sequence is 24, 25, 26, 27, 28, 29, 30, 31, 32, or 33 nucleotide bases in length (e.g., 8-11 amino acid sequences in length).

[0217] Additionally, a variety of methods are available for detecting the presence of a particular mutation in an HIV sequence. Advancements in this field have provided accurate, easy, and inexpensive large-scale SNP genotyping. For example, several techniques have been described including dynamic allele-specific hybridization (DASH), microplate array diagonal gel electrophoresis (MADGE), pyrosequencing, oligonucleotide-specific ligation, the TaqMan system as well as various DNA “chip” technologies such as the Affymetrix SNP chips. These methods utilize amplification of a target genetic region, typically by PCR. Still other methods, based on the generation of small signal molecules by invasive cleavage followed by mass spectrometry or immobilized padlock probes and rolling-circle amplification. Several of the methods known in the art for detecting specific mutations are summarized below.

[0218] PCR based detection means can include multiplex amplification of a plurality of markers simultaneously. For example, it is well known in the art to select PCR primers to generate PCR products that do not overlap in size and can be analyzed simultaneously. Alternatively, it is possible to amplify different markers with primers that are differentially labeled and thus can each be differentially detected. Of course, hybridization based detection means allow the differential detection of multiple PCR products in a sample. Other techniques are known in the art to allow multiplex analyses of a plurality of markers.

[0219] Several methods have been developed to facilitate analysis of single nucleotide polymorphisms in genomic DNA or cellular RNA. For example, a single base polymorphism can be detected by using a specialized exonuclease-resistant nucleotide, as disclosed, e.g., in Mundy, C. R. (U.S. Pat. No. 4,656,127). According to the method, a primer complementary to the allelic sequence immediately 3′ to the polymorphic site is permitted to hybridize to a target molecule. If the polymorphic site on the target molecule contains a nucleotide that is complementary to the particular exonuclease-resistant nucleotide derivative present, then that derivative will be incorporated onto the end of the hybridized primer. Such incorporation renders the primer resistant to exonuclease, and thereby permits its detection. Since the identity of the exonuclease-resistant derivative of the sample is known, a finding that the primer has become resistant to exonucleases reveals that the nucleotide(s) present in the polymorphic site of the target molecule is complementary to that of the nucleotide derivative used in the reaction. This method has the advantage that it does not require the determination of large amounts of extraneous sequence data.

[0220] A solution-based method can be used for determining the identity of a nucleotide of a polymorphic site. Cohen, D. et al. (French Patent 2,650,840; PCT Appln. No. WO91/02087). As in the Mundy method of U.S. Pat. No. 4,656,127, a primer is employed that is complementary to allelic sequences immediately 3′ to a polymorphic site. The method determines the identity of the nucleotide of that site using labeled dideoxynucleotide derivatives, which, if complementary to the nucleotide of the polymorphic site will become incorporated onto the terminus of the primer.

[0221] An alternative method, known as Genetic Bit Analysis or GBA is described by Goelet, P. et al. (PCT Appln. No. 92/15712). The method of Goelet, P. et al. uses mixtures of labeled terminators and a primer that is complementary to the sequence 3′ to a polymorphic site. The labeled terminator that is incorporated is thus determined by, and complementary to, the nucleotide present in the polymorphic site of the target molecule being evaluated. In contrast to the method of Cohen et al. (French Patent 2,650,840; PCT Appln. No. WO91/02087) the method of Goelet, P. et al. can be a heterogeneous phase assay, in which the primer or the target molecule is immobilized to a solid phase.

### IV. Antigens

[0222] Antigens can include nucleotides or polypeptides. For example, an antigen can be an RNA sequence that encodes for a polypeptide sequence. Antigens useful in vaccines can therefore include nucleotide sequences or polypeptide sequences. In one aspect, antigen peptides can be described in the context of their coding sequence where an antigen includes the nucleotide sequence (e.g., DNA or RNA) that codes for the related polypeptide sequence. In one aspect, antigens bind to MHC proteins, and therefore, can be presented by antigen presenting cells such that epitope sequences on the antigens can bind to T cell receptors. In some scenarios, antigens bind to MHC class I proteins. In some scenarios, antigens bind to MHC class II proteins. In some scenarios, antigens bind to both MHC class I and class II proteins.

[0223] Antigens may be derived from either of the two major categories of HIV (HIV-1 or HIV-2). Additionally, antigens may be derived from the different types of HIV-1 including Group N, Group O, or Group P. Additionally, antigens derived from Group N may be from one of subtypes A1, A2, B, C, D, F1, F2, G, H, J, or K.

[0224] Antigens (and corresponding epitope sequences) derived from HIV may differ depending on the category, type, or subtype of HIV. For example, epitope sequences of HIV antigens derived from different HIV subtypes are shown in the second column of Tables 35-45. Additionally, there are a number of epitope sequences that are invariant across the HIV subtypes. Therefore, certain epitope sequences are included in more than one of Tables 35-45.

[0225] One or more polypeptides encoded by an antigen nucleotide sequence can comprise at least one of: a binding affinity with MHC with an IC50 value of less than 1000 nM, for MHC Class I peptides a length of 8-15, 8, 9, 10, 11, 12, 13, 14, or 15 amino acids, presence of sequence motifs within or near the peptide promoting proteasome cleavage, and presence or sequence motifs promoting TAP transport. For MHC Class II peptides a length 6-30, 6, 7, 8, 9, 10, 11, 12, 13, 14, 15, 16, 17, 18, 19, 20, 21, 22, 23, 24, 25, 26, 27, 28, 29, or 30 amino acids, presence of sequence motifs within or near the peptide promoting cleavage by extracellular or lysosomal proteases (e.g., cathepsins) or HLA-DM catalyzed HLA binding.

[0226] One or more antigens can be presented on HIV.

[0227] One or more antigens can be immunogenic in a subject, e.g., capable of eliciting a T cell response or a B cell response in the subject. Optionally, the subject may have HIV.

[0228] One or more antigens that induce an autoimmune response in a subject can be excluded from consideration in the context of vaccine generation for a subject that optionally has HIV.

[0229] The size of at least one antigenic peptide molecule can comprise, but is not limited to, about 5, about 6, about 7, about 8, about 9, about 10, about 11, about 12, about 13, about 14, about 15, about 16, about 17, about 18, about 19, about 20, about 21, about 22, about 23, about 24, about 25, about 26, about 27, about 28, about 29, about 30, about 31, about 32, about 33, about 34, about 35, about 36, about 37, about 38, about 39, about 40, about 41, about 42, about 43, about 44, about 45, about 46, about 47, about 48, about 49, about 50, about 60, about 70, about 80, about 90, about 100, about 110, about 120 or greater amino molecule residues, and any range derivable therein. In specific embodiments the antigenic peptide molecules are equal to or less than 50 amino acids.

[0230] Antigenic peptides and polypeptides can be: for MHC Class I, 15 residues or less in length and usually consist of between about 8 and about 11 residues, particularly 9 or 10 residues; for MHC Class II, 6-30 residues, inclusive.

[0231] If desirable, a longer peptide can be designed in several ways. In one case, when presentation likelihoods of peptides on HLA alleles are predicted or known, a longer peptide could consist of either: (1) individual presented peptides with an extensions of 2-5 amino acids toward the N- and C-terminus of each corresponding gene product; (2) a concatenation of some or all of the presented peptides with extended sequences for each. Use of a longer peptide allows endogenous processing by patient cells and may lead to more effective antigen presentation and induction of T cell responses.

[0232] Antigenic peptides and polypeptides can be presented on a HLA protein. In some aspects, an antigenic peptide or polypeptide can have an IC50 of at least less than 5000 nM, at least less than 1000 nM, at least less than 500 nM, at least less than 250 nM, at least less than 200 nM, at least less than 150 nM, at least less than 100 nM, at least less than 50 nM or less.

[0233] In some aspects, antigenic peptides and polypeptides do not induce an autoimmune response and/or invoke immunological tolerance when administered to a subject.

[0234] Antigenic peptides and polypeptides having a desired activity or property can be modified to provide certain desired attributes, e.g., improved pharmacological characteristics, while increasing or at least retaining substantially all of the biological activity of the unmodified peptide to bind the desired MHC molecule and activate the appropriate T cell. For instance, antigenic peptide and polypeptides can be subject to various changes, such as substitutions, either conservative or non-conservative, where such changes might provide for certain advantages in their use, such as improved MHC binding, stability or presentation. By conservative substitutions is meant replacing an amino acid residue with another which is biologically and/or chemically similar, e.g., one hydrophobic residue for another, or one polar residue for another. The substitutions include combinations such as Gly, Ala; Val, Ile, Leu, Met; Asp, Glu; Asn, Gln; Ser, Thr; Lys, Arg; and Phe, Tyr. The effect of single amino acid substitutions may also be probed using D-amino acids. Such modifications can be made using well known peptide synthesis procedures, as described in e.g., Merrifield, Science 232:341-347 (1986), Barany & Merrifield, The Peptides, Gross & Meienhofer, eds. (N.Y., Academic Press), pp. 1-284 (1979); and Stewart & Young, Solid Phase Peptide Synthesis, (Rockford, Ill., Pierce), 2d Ed. (1984).

[0235] Modifications of peptides and polypeptides with various amino acid mimetics or unnatural amino acids can be particularly useful in increasing the stability of the peptide and polypeptide in vivo. Stability can be assayed in a number of ways. For instance, peptidases and various biological media, such as human plasma and serum, have been used to test stability. See, e.g., Verhoef et al., Eur. J. Drug Metab Pharmacokin. 11:291-302 (1986). Half-life of the peptides can be conveniently determined using a 25% human serum (v/v) assay. The protocol is generally as follows. Pooled human serum (Type AB, non-heat inactivated) is delipidated by centrifugation before use. The serum is then diluted to 25% with RPMI tissue culture media and used to test peptide stability. At predetermined time intervals a small amount of reaction solution is removed and added to either 6% aqueous trichloracetic acid or ethanol. The cloudy reaction sample is cooled (4 degrees C.) for 15 minutes and then spun to pellet the precipitated serum proteins. The presence of the peptides is then determined by reversed-phase HPLC using stability-specific chromatography conditions.

[0236] The peptides and polypeptides can be modified to provide desired attributes other than improved serum half-life. For instance, the ability of the peptides to induce CTL activity can be enhanced by linkage to a sequence which contains at least one epitope that is capable of inducing a T helper cell response. Immunogenic peptides/T helper conjugates can be linked by a spacer molecule. The spacer is typically comprised of relatively small, neutral molecules, such as amino acids or amino acid mimetics, which are substantially uncharged under physiological conditions. The spacers are typically selected from, e.g., Ala, Gly, or other neutral spacers of nonpolar amino acids or neutral polar amino acids. It will be understood that the optionally present spacer need not be comprised of the same residues and thus can be a hetero- or homo-oligomer. When present, the spacer will usually be at least one or two residues, more usually three to six residues. Alternatively, the peptide can be linked to the T helper peptide without a spacer.

[0237] An antigenic peptide can be linked to the T helper peptide either directly or via a spacer either at the amino or carboxy terminus of the peptide. The amino terminus of either the antigenic peptide or the T helper peptide can be acylated. Exemplary T helper peptides include tetanus toxoid 830-843, influenza 307-319, malaria circumsporozoite 382-398 and 378-389.

[0238] Proteins or peptides can be made by any technique known to those of skill in the art, including the expression of proteins, polypeptides or peptides through standard molecular biological techniques, the isolation of proteins or peptides from natural sources, or the chemical synthesis of proteins or peptides. The nucleotide and protein, polypeptide and peptide sequences corresponding to various genes have been previously disclosed, and can be found at computerized databases known to those of ordinary skill in the art. One such database is the National Center for Biotechnology Information's Genbank and GenPept databases located at the National Institutes of Health website. The coding regions for known genes can be amplified and/or expressed using the techniques disclosed herein or as would be known to those of ordinary skill in the art. Alternatively, various commercial preparations of proteins, polypeptides and peptides are known to those of skill in the art.

[0239] In a further aspect an antigen includes a nucleic acid (e.g. polynucleotide) that encodes an antigenic peptide or portion thereof. The polynucleotide can be, e.g., DNA, cDNA, PNA, CNA, RNA (e.g., mRNA), either single- and/or double-stranded, or native or stabilized forms of polynucleotides, such as, e.g., polynucleotides with a phosphorothiate backbone, or combinations thereof and it may or may not contain introns. A still further aspect provides an expression vector capable of expressing a polypeptide or portion thereof. Expression vectors for different cell types are well known in the art and can be selected without undue experimentation. Generally, DNA is inserted into an expression vector, such as a plasmid, in proper orientation and correct reading frame for expression. If necessary, DNA can be linked to the appropriate transcriptional and translational regulatory control nucleotide sequences recognized by the desired host, although such controls are generally available in the expression vector. The vector is then introduced into the host through standard techniques. Guidance can be found e.g. in Sambrook et al. (1989) Molecular Cloning, A Laboratory Manual, Cold Spring Harbor Laboratory, Cold Spring Harbor, N.Y.

### V. Vaccine Compositions

[0240] Also disclosed herein is an immunogenic composition, e.g., a vaccine composition, capable of raising a specific immune response, e.g., a HIV-specific immune response. Vaccine compositions typically comprise one or more antigens selected using a method described herein.

[0241] In one aspect, the vaccine composition includes one antigen with an epitope sequence selected from any one of SEQ ID Nos: 325-22349. In other aspects, the vaccine composition includes a plurality of antigens with epitope sequences selected from any one of SEQ ID Nos: 325-22349. In such scenarios, at least two of the plurality of antigens can be distinct peptides. By distinct polypeptides is meant that the peptides vary by length, amino acid sequence, or both.

[0242] In some aspects, the vaccine composition includes one or more epitope encoding nucleic acid sequences. In one aspect, the epitope encoding nucleic acid sequences are MHC class I epitope encoding nucleic acid sequences. Each epitope encoding nucleic acid sequence can encode for an antigen with epitope sequences selected from any one of SEQ ID Nos: 325-22349.

[0243] In some aspects, a vaccine composition can contain between 1 and 30 peptides, 2, 3, 4, 5, 6, 7, 8, 9, 10, 11, 12, 13, 14, 15, 16, 17, 18, 19, 20, 21, 22, 23, 24, 25, 26, 27, 28, 29, or 30 different peptides, 6, 7, 8, 9, 10 11, 12, 13, or 14 different peptides, or 12, 13 or 14 different peptides. In various embodiments, the peptides included in the vaccine composition include an epitope sequence selected from any one of SEQ ID Nos: 325-22349 shown in Tables 35-45. Peptides can include post-translational modifications. A vaccine can contain between 1 and 100 or more nucleotide sequences, 2, 3, 4, 5, 6, 7, 8, 9, 10, 11, 12, 13, 14, 15, 16, 17, 18, 19, 20, 21, 22, 23, 24, 25, 26, 27, 28, 29, 30, 31, 32, 33, 34, 35, 36, 37, 38, 39, 40, 41, 42, 43, 44, 45, 46, 47, 48, 49, 50, 51, 52, 53, 54, 55, 56, 57, 58, 59, 60, 61, 62, 63, 64, 65, 66, 67, 68, 69, 70, 71, 72, 73, 74, 75, 76, 77, 78, 79, 80, 81, 82, 83, 84, 85, 86, 87, 88, 89, 90, 91, 92, 93, 94, 95, 96, 97, 98, 99, 100 or more different nucleotide sequences, 6, 7, 8, 9, 10 11, 12, 13, or 14 different nucleotide sequences, or 12, 13 or 14 different nucleotide sequences. A vaccine can contain between 1 and 30 antigen sequences, 2, 3, 4, 5, 6, 7, 8, 9, 10, 11, 12, 13, 14, 15, 16, 17, 18, 19, 20, 21, 22, 23, 24, 25, 26, 27, 28, 29, 30, 31, 32, 33, 34, 35, 36, 37, 38, 39, 40, 41, 42, 43, 44, 45, 46, 47, 48, 49, 50, 51, 52, 53, 54, 55, 56, 57, 58, 59, 60, 61, 62, 63, 64, 65, 66, 67, 68, 69, 70, 71, 72, 73, 74, 75, 76, 77, 78, 79, 80, 81, 82, 83, 84, 85, 86, 87, 88, 89, 90, 91, 92, 93, 94, 95, 96, 97, 98, 99, 100 or more different antigen sequences, 6, 7, 8, 9, 10 11, 12, 13, or 14 different antigen sequences, or 12, 13 or 14 different antigen sequences. A vaccine can contain between 1 and 30 antigen-encoding sequences, 2, 3, 4, 5, 6, 7, 8, 9, 10, 11, 12, 13, 14, 15, 16, 17, 18, 19, 20, 21, 22, 23, 24, 25, 26, 27, 28, 29, 30, 31, 32, 33, 34, 35, 36, 37, 38, 39, 40, 41, 42, 43, 44, 45, 46, 47, 48, 49, 50, 51, 52, 53, 54, 55, 56, 57, 58, 59, 60, 61, 62, 63, 64, 65, 66, 67, 68, 69, 70, 71, 72, 73, 74, 75, 76, 77, 78, 79, 80, 81, 82, 83, 84, 85, 86, 87, 88, 89, 90, 91, 92, 93, 94, 95, 96, 97, 98, 99, 100 or more different antigen-encoding sequences, 6, 7, 8, 9, 10 11, 12, 13, or 14 different antigen-encoding sequences, or 12, 13 or 14 different antigen-encoding sequences. In various embodiments, the antigen-encoding sequences encode for antigens that comprise epitope sequences selected from any one of SEQ ID Nos: 325-22349 shown in Tables 35-45.

[0244] Further details of the selection of candidate epitope sequences or antigen-encoding nucleic acid sequences that are to be included in the vaccine composition are described below.

[0245] In one embodiment, different peptides and/or polypeptides or nucleotide sequences encoding them are selected so that the peptides and/or polypeptides capable of associating with different MHC molecules, such as different MHC class I molecules and/or different MHC class II molecules. In some aspects, one vaccine composition comprises coding sequence for peptides and/or polypeptides capable of associating with the most frequently occurring MHC class I molecules and/or different MHC class II molecules. Hence, vaccine compositions can comprise different fragments capable of associating with at least 2 preferred, at least 3 preferred, or at least 4 preferred MHC class I molecules and/or different MHC class II molecules.

[0246] The vaccine composition can be capable of raising a specific cytotoxic T-cells response and/or a specific helper T-cell response.

[0247] Antigens can also be included in viral vector-based vaccine platforms, such as vaccinia, fowlpox, self-replicating alphavirus, marabavirus, adenovirus (See, e.g., Tatsis et al., Adenoviruses, Molecular Therapy (2004) 10, 616-629), or lentivirus, including but not limited to second, third or hybrid second/third generation lentivirus and recombinant lentivirus of any generation designed to target specific cell types or receptors (See, e.g., Hu et al., Immunization Delivered by Lentiviral Vectors for Cancer and Infectious Diseases, Immunol Rev. (2011) 239(1): 45-61, Sakuma et al., Lentiviral vectors: basic to translational, Biochem J. (2012) 443(3):603-18, Cooper et al., Rescue of splicing-mediated intron loss maximizes expression in lentiviral vectors containing the human ubiquitin C promoter, Nucl. Acids Res. (2015) 43 (1): 682-690, Zufferey et al., Self-Inactivating Lentivirus Vector for Safe and Efficient In Vivo Gene Delivery, J. Virol. (1998) 72 (12): 9873-9880). Dependent on the packaging capacity of the above mentioned viral vector-based vaccine platforms, this approach can deliver one or more nucleotide sequences that encode one or more antigen peptides. The sequences may be flanked by non-mutated sequences, may be separated by linkers or may be preceded with one or more sequences targeting a subcellular compartment (See, e.g., Gros et al., Prospective identification of antigen-specific lymphocytes in the peripheral blood of melanoma patients, Nat Med. (2016) 22 (4):433-8, Stronen et al., Targeting of cancer antigens with donor-derived T cell receptor repertoires, Science. (2016) 352 (6291):1337-41, Lu et al., Efficient identification of mutated cancer antigens recognized by T cells associated with durable tumor regressions, Clin Cancer Res. (2014) 20(13):3401-10). Upon introduction into a host, infected cells express the antigens, and thereby elicit a host immune (e.g., CTL) response against the peptide(s). Vaccinia vectors and methods useful in immunization protocols are described in, e.g., U.S. Pat. No. 4,722,848. Another vector is BCG (Bacille Calmette Guerin). BCG vectors are described in Stover et al. (Nature 351:456-460 (1991)). A wide variety of other vaccine vectors useful for therapeutic administration or immunization of antigens, e.g., Salmonella typhi vectors, and the like will be apparent to those skilled in the art from the description herein.

[0248] V.A. Antigen Vaccine Sequence Selection

[0249] Selected candidate antigens with epitope sequences are included in antigen-based vaccines. In various embodiments, epitope sequences for candidate antigens are selected using a presentation model, as is described in further detail below in reference to the presentation model. In various embodiments, epitope sequences for candidate antigens are selected from a Los Alamos National Lab's HIV database, such as the Los Alamos Best-defined (“A-list”) CTL epitopes,¹⁰⁸ which is incorporated by reference in its entirety. In various embodiments, epitope sequences for candidate antigens are selected using a presentation model that is deployed to evaluate epitope sequences from the Los Alamos Best-defined (“A-list”) CTL epitopes.¹⁰⁸ Although the subsequent description refers to inclusion of antigenic peptides in the antigen-based vaccine, one skilled in the art may understand that the subsequent description can be applied for the inclusion of antigen-encoding nucleic acid sequences in an antigen cassette, where the antigen-encoding nucleic acid sequences encode for these antigenic peptides. Further details of the antigen cassette are discussed below.

[0250] In one aspect, each antigen-based vaccine may be developed for patients with a haplotype that includes one or more particular HLA alleles. Therefore, a patient with a particular HLA can be treated or vaccinated with an antigen-based vaccine that is developed specifically for the particular HLA allele. In some aspects, each antigen-based vaccine is developed for patients with a haplotype that includes particular combinations of HLA alleles. In one embodiment, the particular combination of HLA alleles is known to be expressed by a population of individuals of a particular ancestral descent. Thus, a patient who is of that ancestral descent is also likely to express the combination of HLA alleles and therefore, can be a candidate for a vaccine that includes antigens that are likely to be presented by the expressed combination of HLA alleles. In some aspects, an antigen-based vaccine can be developed with a sufficient number of antigens such that a patient of any ancestral descent is likely to present a subset of the antigens included in the antigen-based vaccine. In other words, with a sufficient number of antigens in the antigen-based vaccine, such an antigen-based vaccine can be efficacious for any patient.

[0251] As an example, antigen-based vaccines can be developed for any one or more of the following HLA alleles: A0101, A0201, A0203, A0204, A0205, A0206, A0207, A0208, A0301, A0302, A1101, A2301, A2402, A2501, A2601, A2602, A2603, A2901, A2902, A3001, A3002, A3004, A3101, A3201, A3301, A3303, A6801, A6802, B0702, B0801, B1301, B1302, B1401, B1402, B1501, B1502, B1503, B1510, B1513, B1801, B2702, B2705, B3501, B3502, B3503, B3508, B3512, B3701, B3801, B3901, B3906, B4001, B4002, B4006, B4102, B4402, B4403, B4405, B4601, B4801, B4901, B5001, B5101, B5401, B5501, B5502, B5601, B5701, B5801, C0102, C0202, C0302, C0303, C0304, C0401, C0501, C0602, C0701, C0702, C0704, C0801, C0802, C0803, C1203, C1402, C1403, C1502, C1601, C1602, C1604, C1701. Antigens for inclusion in the antigen-based vaccine can be selected by reference to Tables 35-45 (e.g., any one of SEQ ID Nos: 325-22349), where each relevant epitope sequence of an antigen for inclusion is selected by identifying rows that list the particular HLA allele that the antigen-based vaccine is developed for. Notably, certain epitope sequences are invariant across multiple HIV subtypes and therefore, appear across multiple tables in Tables 35-45. In some aspects, antigens for inclusion in the antigen-based vaccine can each include epitope sequences that appear in more than one of Tables 35-45. Additionally, antigens for inclusion in the antigen-based vaccine can be selected from a list of validated HIV epitopes. Examples of validated HIV epitopes can be found in the journal article “Best-Characterized HIV-1 CTL Epitopes: The 2013 Update” (which refers to validated HIV epitopes as “best defined HIV CTL epitopes in Table I-A-1), which is hereby incorporated by reference in its entirety.¹⁰⁵ Additional examples of validated HIV epitopes can be found in the journal article “The 2019 Optimal HIV CTL epitopes update: Growing diversity in epitope length and HLA restriction” which is hereby incorporated by reference in its entirety.¹⁰⁹

[0252] For example, referring to the first row of Table 35, if an antigen-based vaccine is developed for the A2501 HLA allele, then the epitope sequence “DTIAIAVAGW (SEQ ID NO: 756)” can be selected for inclusion. Such an antigen-based vaccine can include additional epitope sequences from Tables 35-45 that share a row with the A2501 HLA allele. For example, referring to Table 36, the epitope sequence “DTIAVAVAEW (SEQ ID NO: 2606)” can additionally be selected for inclusion in the antigen-based vaccine.

[0253] In some aspects, antigen-based vaccines can be developed for combinations of the aforementioned HLA alleles. For example, if certain combinations of HLA alleles are known to be expressed together by subjects, then an antigen-based vaccine can be developed for the combination of expressed HLA alleles. In some aspects, 1, 2, 3, 4, 5, 6, 7, 8, 9, or 10 HLA alleles are included in the combination of HLA alleles. Antigens for inclusion in the antigen-based vaccine can be selected by reference to Tables 35-45 (e.g., any one of SEQ ID Nos: 325-22349), where each relevant epitope sequence of an antigen for inclusion is selected by identifying rows that list any one HLA allele in the combination of HLA alleles.

[0254] In one aspect, each antigen-based vaccine may be developed for patients that are infected, exposed, or susceptible to infection by a particular category, type, or subtype of HIV. Therefore, a patient can be treated or vaccinated with an antigen-based vaccine that is developed specifically for the particular category, type, or subtype of HIV that the patient is infected, exposed, or susceptible to infection to.

[0255] For example, antigen-based vaccines can be developed for any one of the categories (e.g., HIV-1 or HIV-2), types (Group N, Group 0, or Group P), or subtypes (A1, A2, B, C, D, F1, F2, G, H, J, or K) of HIV. Antigens for inclusion in the antigen-based vaccine can be selected by reference to Tables 35-45 (e.g., any one of SEQ ID Nos: 325-22349).

[0256] In various embodiments, an antigen-based vaccine developed for HIV subtype A1 can include one or more antigens with HIV epitope sequences shown in Table 35 (e.g., any one of SEQ ID NOs: 325-2165).

[0257] In various embodiments, an antigen-based vaccine developed for HIV subtype A2 can include one or more antigens with HIV epitope sequences shown in Table 36 (e.g., any one of SEQ ID NOs: 2166-4106).

[0258] In various embodiments, an antigen-based vaccine developed for HIV subtype B can include one or more antigens with HIV epitope sequences shown in Table 37 (e.g., any one of SEQ ID NOs: 2166-4106).

[0259] In various embodiments, an antigen-based vaccine developed for HIV subtype C can include one or more antigens with HIV epitope sequences shown in Table 38 (e.g., any one of SEQ ID NOs: 6242-8389).

[0260] In various embodiments, an antigen-based vaccine developed for HIV subtype D can include one or more antigens with HIV epitope sequences shown in Table 39 (e.g., any one of SEQ ID NOs: 8930-10626).

[0261] In various embodiments, an antigen-based vaccine developed for HIV subtype F1 can include one or more antigens with HIV epitope sequences shown in Table 40 (e.g., any one of SEQ ID NOs: 10627-12810).

[0262] In various embodiments, an antigen-based vaccine developed for HIV subtype F2 can include one or more antigens with HIV epitope sequences shown in Table 41 (e.g., any one of SEQ ID NOs: 12811-15079).

[0263] In various embodiments, an antigen-based vaccine developed for HIV subtype G can include one or more antigens with HIV epitope sequences shown in Table 42 (e.g., any one of SEQ ID NOs: 15080-17174).

[0264] In various embodiments, an antigen-based vaccine developed for HIV subtype H can include one or more antigens with HIV epitope sequences shown in Table 43 (e.g., any one of SEQ ID NOs: 17175-19388).

[0265] In various embodiments, an antigen-based vaccine developed for HIV subtype J can include one or more antigens with HIV epitope sequences shown in Table 44 (e.g., any one of SEQ ID NOs: 19389-21003).

[0266] In various embodiments, an antigen-based vaccine developed for HIV subtype K can include one or more antigens with HIV epitope sequences shown in Table 45 (e.g., any one of SEQ ID NOs: 21004-22349).

[0267] In one aspect, each antigen-based vaccine may be developed for patients taking into consideration both 1) the patient's HLA type that includes the expression of one or more particular HLA alleles and 2) the particular category, type, or subtype of HIV that the patient is infected, exposed to, or susceptible to exposure to. As an example, a patient that expresses a particular HLA allele and who is exposed to or susceptible to exposure to a subtype of HIV can be treated or vaccinated with an antigen-based vaccine that is developed specifically for the subtype of HIV and the patient's expressed HLA allele. Antigens for inclusion in the antigen-based vaccine can be selected by reference to one of Tables 35-45 (e.g., any one of SEQ ID Nos: 325-22349), where each relevant epitope sequence of an antigen for inclusion is selected by identifying rows in that Table that list a particular HLA allele.

[0268] For example, an antigen-based vaccine can be developed for HIV subtype A1 and for patients with the B4102 HLA allele. Referring to Table 35, a first antigen with epitope sequence “AEVVQKVTM (SEQ ID NO: 1594)” and a second antigen with epitope sequence “AEVVQKVVM (SEQ ID NO: 1595)” can be selected for inclusion in the antigen-based vaccine. Such an antigen-based vaccine can include additional HIV epitope sequences from Table 35 (e.g., any of SEQ ID NOs: 1594-1642) that share a row with the B4102 HLA allele. As another example, an antigen-based vaccine can be developed for HIV subtype A2 and for patients with the B4001 HLA allele. Referring to Table 36, a first antigen with epitope sequence “TESNDTITL (SEQ ID NO: 3424)” and a second antigen with epitope sequence “AEDPEREVL (SEQ ID NO: 3425)” can be selected for inclusion in the antigen-based vaccine. Such an antigen-based vaccine can include additional HIV epitope sequences from Table 36 that share a row with the B4001 HLA allele (e.g., any of SEQ ID NOs: 3424-3458).

[0269] In particular embodiments, one or more HIV epitope sequences or one or more HIV epitope sequences encoded by a HIV epitope encoding sequence that are selected for inclusion in an antigen-based vaccine can include any of SEQ ID NOs: 325-328, 2166-2178, 4107-4113, 6242-6248, 8390-8397, 10627-10633, 12811-12820, 15080-15086, 17175-17184, 19389-19396, or 21004-21009.

[0270] In particular embodiments, one or more HIV epitope sequences or one or more HIV epitope sequences encoded by HIV epitope encoding sequences that are selected for inclusion in an antigen-based vaccine can include any of SEQ ID NOs: 329-353, 2179-2200, 4114-4134, 6249-6270, 8398-8415, 10634-10654, 12821-12850, 15087-15107, 17185-17213, 19397-19420, or 21010-21031.

[0271] In particular embodiments, one or more HIV epitope sequences or one or more HIV epitope sequences encoded by HIV epitope encoding sequences that are selected for inclusion in an antigen-based vaccine can include any of SEQ ID NOs: 354-403, 2201-2248, 4135-4177, 6271-6315, 8416-8474, 10655-10700, 12851-12912, 15108-15155, 17214-17264, 19421-19463, or 21032-21064.

[0272] In particular embodiments, one or more HIV epitope sequences or one or more HIV epitope sequences encoded by HIV epitope encoding sequences that are selected for inclusion in an antigen-based vaccine can include any of SEQ ID NOs: 404-469, 2249-2326, 4178-4261, 6316-6400, 8475-8558, 10701-10768, 12913-12994, 15156-15214, 17265-17349, 19464-19518, 21065-21117.

[0273] In particular embodiments, one or more HIV epitope sequences or one or more HIV epitope sequences encoded by HIV epitope encoding sequences that are selected for inclusion in an antigen-based vaccine can include any of 470-526, 2327-2379, 6401-6450, 8559-8626, 10769-10822, 12995-13056, 15215-15263, 17350-17405, 19519-19570, and 21118-21161.

[0274] In particular embodiments, one or more HIV epitope sequences or one or more HIV epitope sequences encoded by HIV epitope encoding sequences that are selected for inclusion in an antigen-based vaccine can include any of SEQ ID NOs: 527-565, 2380-2421, 6451-6492, 8627-8671, 10823-10867, 10357-13098, 15264-15292, 17406-17448, 19571-19604, and 21162-21192.

[0275] In particular embodiments, one or more HIV epitope sequences or one or more HIV epitope sequences encoded by HIV epitope encoding sequences that are selected for inclusion in an antigen-based vaccine can include any of 566-587, 2422-2438, 6493-6509, 8672-8689, 10868-10887, 13099-13125, 15293-15307, 17449-17473, 19605-19618, and 21193-21205.

[0276] In particular embodiments, one or more HIV epitope sequences or one or more HIV epitope sequences encoded by HIV epitope encoding sequences that are selected for inclusion in an antigen-based vaccine can include any of SEQ ID NOs: 588-630, 2439-2477, 6510-6548, 8690-8733, 10888-10931, 13126-13179, 15308-15336, 17474-17512, 19619-19649, and 21206-21233.

[0277] In particular embodiments, one or more HIV epitope sequences or one or more HIV epitope sequences encoded by HIV epitope encoding sequences that are selected for inclusion in an antigen-based vaccine can include any of 631-650, 2478-2501, 6549-6573, 8734-8761, 10932-10969, 13180-13224, 15337-15354, 17513-17543, 19650-19665, and 21234-21247.

[0278] In particular embodiments, one or more HIV epitope sequences or one or more HIV epitope sequences encoded by HIV epitope encoding sequences that are selected for inclusion in an antigen-based vaccine can include any of 651-682, 2502-2541, 6574-6618, 8762-8809, 10970-11026, 13225-13290, 15355-15396, 17544-17603, 19666-19697, and 21248-21274.

[0279] In particular embodiments, one or more HIV epitope sequences or one or more HIV epitope sequences encoded by HIV epitope encoding sequences that are selected for inclusion in an antigen-based vaccine can include any of SEQ ID NOs: 683-726, 2542-2583, 6619-6668, 8810-8862, 11027-11087, 13291-13370, 15397-15451, 17604-17652, 19698-19726, and 21275-21309.

[0280] In particular embodiments, one or more HIV epitope sequences or one or more HIV epitope sequences encoded by HIV epitope encoding sequences that are selected for inclusion in an antigen-based vaccine can include any of SEQ ID NOs: 727-741, 2584-2593, 6669-6685, 8863-8871, 11088-11103, 13371-13385, 15452-15465, 17653-17667, 19727-19738, and 21310-21317. Such an antigen-based vaccine can be useful for treating a patient who expresses the HLA allele A2301.

[0281] In particular embodiments, one or more HIV epitope sequences or one or more HIV epitope sequences encoded by HIV epitope encoding sequences that are selected for inclusion in an antigen-based vaccine can include any of SEQ ID NOs: 742-755, 2594-2605, 6686-6698, 8872-8885, 11104-11116, 13386-13397, 15466-15479, 17668-17679, 19739-19750, and 21318-21323. Such an antigen-based vaccine can be useful for treating a patient who expresses the HLA allele A2402.

[0282] In particular embodiments, one or more HIV epitope sequences or one or more HIV epitope sequences encoded by HIV epitope encoding sequences that are selected for inclusion in an antigen-based vaccine can include any of SEQ ID NOs: SEQ ID NOs: 756-769, 2606-2622, 6699-6711, 8886-8903, 11117-11132, 13398-13414, 15480-15505, 17680-17693, 19751-19760, and 21324-21333. Such an antigen-based vaccine can be useful for treating a patient who expresses the HLA allele 2501.

[0283] In particular embodiments, one or more HIV epitope sequences or one or more HIV epitope sequences encoded by HIV epitope encoding sequences that are selected for inclusion in an antigen-based vaccine can include any of SEQ ID NOs: 770-783, 2623-2640, 6712-6728, 8904-8927, 11133-11155, 13415-13433, 15506-15533, 17694-17714, 19761-19773, and 21334-21346. Such an antigen-based vaccine can be useful for treating a patient who expresses the HLA allele 2601.

[0284] In particular embodiments, one or more HIV epitope sequences or one or more HIV epitope sequences encoded by HIV epitope encoding sequences that are selected for inclusion in an antigen-based vaccine can include any of SEQ ID NOs: SEQ ID NOs: 784-790, 2641-2652, 6729-6739, 8928-8937, 11156-11168, 13434-13446, 1553-15550, 17715-17723, 19774-19782, and 21347-21353. Such an antigen-based vaccine can be useful for treating a patient who expresses the HLA allele 2602.

[0285] In particular embodiments, one or more HIV epitope sequences or one or more HIV epitope sequences encoded by HIV epitope encoding sequences that are selected for inclusion in an antigen-based vaccine can include any of SEQ ID NOs: 791-802, 2653-2671, 6740-6759, 8938-8959, 11169-11189, 13447-13464, 15551-15569, 17724-17739, 19783-19797, and 21354-21360. Such an antigen-based vaccine can be useful for treating a patient who expresses the HLA allele 2603.

[0286] In particular embodiments, one or more HIV epitope sequences or one or more HIV epitope sequences encoded by HIV epitope encoding sequences that are selected for inclusion in an antigen-based vaccine can include any of SEQ ID NOs: 803-814, 2672-2679, 6760-6768, 8960-8976, 11190-11195, 13465-13474, 15570-15588, 17740-17751, 19798-19808, and 21361-21366. Such an antigen-based vaccine can be useful for treating a patient who expresses the HLA allele A2901.

[0287] In particular embodiments, one or more HIV epitope sequences or one or more HIV epitope sequences encoded by HIV epitope encoding sequences that are selected for inclusion in an antigen-based vaccine can include any of SEQ ID NOs: 815-828, 2680-2698, 6769-6784, 8977-9000, 11196-11210, 13475-13493, 15589-15612, 17752-17773, 19809-19821, and 21367-21376. Such an antigen-based vaccine can be useful for treating a patient who expresses the HLA allele A2902.

[0288] In particular embodiments, one or more HIV epitope sequences or one or more HIV epitope sequences encoded by HIV epitope encoding sequences that are selected for inclusion in an antigen-based vaccine can include any of SEQ ID NOs: SEQ ID NOs: 829-842, 2699-2707, 6785-6793, 9001-9012, 11211-11216, 13494-13501, 15613-15617, 17774-17781, 19822-19828, and 21377-21383). Such an antigen-based vaccine can be useful for treating a patient who expresses the HLA allele A3001.

[0289] In particular embodiments, one or more HIV epitope sequences or one or more HIV epitope sequences encoded by HIV epitope encoding sequences that are selected for inclusion in an antigen-based vaccine can include any of SEQ ID NOs: SEQ ID NOs: 843-857, 2708-2722, 6794-6807, 9013-9040, 11217-11235, 13502-13519, 15618-15636, 17782-17809, 19829-19843, and 21384-21390). Such an antigen-based vaccine can be useful for treating a patient who expresses the HLA allele A3002.

[0290] In particular embodiments, one or more HIV epitope sequences or one or more HIV epitope sequences encoded by HIV epitope encoding sequences that are selected for inclusion in an antigen-based vaccine can include any of SEQ ID NOs: 858-864, 2723-2728, 6808-6817, 9041-9060, 11236-11246, 13520-13530, 15637-15649, 17810-17828, 19844-19850, and 21391-21393). Such an antigen-based vaccine can be useful for treating a patient who expresses the HLA allele A3004.

[0291] In particular embodiments, one or more HIV epitope sequences or one or more HIV epitope sequences encoded by HIV epitope encoding sequences that are selected for inclusion in an antigen-based vaccine can include any of SEQ ID NOs: 865-895, 2729-2757, 6818-6846, 9061-9082, 11247-11272, 13531-13558, 15650-15683, 17829-17862, 19851-19869, and 21394-21407). Such an antigen-based vaccine can be useful for treating a patient who expresses the HLA allele A3101.

[0292] In particular embodiments, one or more HIV epitope sequences or one or more HIV epitope sequences encoded by HIV epitope encoding sequences that are selected for inclusion in an antigen-based vaccine can include any of SEQ ID NOs: 896-899, 2758-2761, 6847-6850, 9083-9091, 11273-11275, 13559-13567, 15684-15688, 17863-17870, 19870-19874, and 21408-21409). Such an antigen-based vaccine can be useful for treating a patient who expresses the HLA allele A3201.

[0293] In particular embodiments, one or more HIV epitope sequences or one or more HIV epitope sequences encoded by HIV epitope encoding sequences that are selected for inclusion in an antigen-based vaccine can include any of SEQ ID NOs: 900-920, 2762-2793, 6851-6880, 9092-9112, 11276-11300, 13568-13585, 15689-15707, 17871-17900, 19875-19898, and 21410-21425. Such an antigen-based vaccine can be useful for treating a patient who expresses the HLA allele A3301.

[0294] In particular embodiments, one or more HIV epitope sequences or one or more HIV epitope sequences encoded by HIV epitope encoding sequences that are selected for inclusion in an antigen-based vaccine can include any of SEQ ID NOs: 921-955, 2794-2851, 6881-6935, 9113-9164, 11301-11346, 13586-13619, 15708-15742, 17901-17964, 19899-19933, and 21426-21459. Such an antigen-based vaccine can be useful for treating a patient who expresses the HLA allele A3303.

[0295] In particular embodiments, one or more HIV epitope sequences or one or more HIV epitope sequences encoded by HIV epitope encoding sequences that are selected for inclusion in an antigen-based vaccine can include any of SEQ ID NOs: 956-997, 2852-2908, 6936-6986, 9165-9228, 11347-11410, 13620-13667, 15743-15785, 17965-18029, 19934-19986, and 21460-24192. Such an antigen-based vaccine can be useful for treating a patient who expresses the HLA allele A6801.

[0296] In particular embodiments, one or more HIV epitope sequences or one or more HIV epitope sequences encoded by HIV epitope encoding sequences that are selected for inclusion in an antigen-based vaccine can include any of SEQ ID NOs: 998-1032, 2909-2946, 6897-7037, 9229-9292, 11411-11461, 13668-13715, 15786-15828, 18030-18068, 19987-20027, and 24193-21523). Such an antigen-based vaccine can be useful for treating a patient who expresses the HLA allele A6802.

[0297] In particular embodiments, one or more HIV epitope sequences or one or more HIV epitope sequences encoded by HIV epitope encoding sequences that are selected for inclusion in an antigen-based vaccine can include any of SEQ ID NOs: 1033-1050, 2947-2969, 7038-7065, 9293-9312, 11462-11485, 13716-13738, 15829-15849, 18069-18091, 20028-20038, and 21524-21540. Such an antigen-based vaccine can be useful for treating a patient who expresses the HLA allele B0702.

[0298] In particular embodiments, one or more HIV epitope sequences or one or more HIV epitope sequences encoded by HIV epitope encoding sequences that are selected for inclusion in an antigen-based vaccine can include any of SEQ ID NOs: 1051-1066, 2970-2984, 7066-7078, 9313-9325, 11486-11497, 13739-13752, 15850-15862, 18092-18112, 20039-20051, and 21541-21549). Such an antigen-based vaccine can be useful for treating a patient who expresses the HLA allele B0801.

[0299] In particular embodiments, one or more HIV epitope sequences or one or more HIV epitope sequences encoded by HIV epitope encoding sequences that are selected for inclusion in an antigen-based vaccine can include any of SEQ ID NOs: 1067-1080, 2985-2999, 7079-7095, 9326-9347, 11498-11516, 13753-13767, 15863-15875, 18113-18128, 20052-20062, and 21550-21557). Such an antigen-based vaccine can be useful for treating a patient who expresses the HLA allele B1301.

[0300] In particular embodiments, one or more HIV epitope sequences or one or more HIV epitope sequences encoded by HIV epitope encoding sequences that are selected for inclusion in an antigen-based vaccine can include any of SEQ ID NOs: 1081-1117, 3000-3052, 7096-7140, 9348-9406, 11517-11557, 13768-13821, 15876-15923, 18129-18178, 20063-20093, and 21558-21593. Such an antigen-based vaccine can be useful for treating a patient who expresses the HLA allele B1302.

[0301] In particular embodiments, one or more HIV epitope sequences or one or more HIV epitope sequences encoded by HIV epitope encoding sequences that are selected for inclusion in an antigen-based vaccine can include any of SEQ ID NOs: 1118-1125, 3053-3058, 7141-7145, 9407-9411, 11558-11562, 13822-13827, 15924-15931, 18179-18185, 20094-20098, and 21594-21599. Such an antigen-based vaccine can be useful for treating a patient who expresses the HLA allele B1401.

[0302] In particular embodiments, one or more HIV epitope sequences or one or more HIV epitope sequences encoded by HIV epitope encoding sequences that are selected for inclusion in an antigen-based vaccine can include any of SEQ ID NOs: 1126-1139, 3059-3070, 7146-7159, 9412-9418, 11563-11574, 13828-13837, 15932-15943, 18186-18197, 20099-20109, and 21600-21606. Such an antigen-based vaccine can be useful for treating a patient who expresses the HLA allele B1402.

[0303] In particular embodiments, one or more HIV epitope sequences or one or more HIV epitope sequences encoded by HIV epitope encoding sequences that are selected for inclusion in an antigen-based vaccine can include any of SEQ ID NOs: 1140-1192, 3071-3111, 7160-7211, 9419-9481, 11575-11633, 13838-13895, 15944-16001, 18198-18259, 20110-20141, and 21607-21635. Such an antigen-based vaccine can be useful for treating a patient who expresses the HLA allele B1501.

[0304] In particular embodiments, one or more HIV epitope sequences or one or more HIV epitope sequences encoded by HIV epitope encoding sequences that are selected for inclusion in an antigen-based vaccine can include any of SEQ ID NOs: 1193-1220, 3112-3135, 7212-7247, 9482-9501, 11634-11670, 13896-13937, 16002-16036, 18260-18300, 20142-20165, and 21636-21656. Such an antigen-based vaccine can be useful for treating a patient who expresses the HLA allele B1502.

[0305] In particular embodiments, one or more HIV epitope sequences or one or more HIV epitope sequences encoded by HIV epitope encoding sequences that are selected for inclusion in an antigen-based vaccine can include any of SEQ ID NOs: 1221-1245, 3136-3152, 7248-7273, 9502-9526, 11671-11693, 13938-13968, 16037-16065, 18301-18324, 20166-20179, and 21657-21669. Such an antigen-based vaccine can be useful for treating a patient who expresses the HLA allele B1503.

[0306] In particular embodiments, one or more HIV epitope sequences or one or more HIV epitope sequences encoded by HIV epitope encoding sequences that are selected for inclusion in an antigen-based vaccine can include any of SEQ ID NOs: 1246-1266, 3153-3178, 7274-7296, 9527-9548, 11694-11722, 13969-13995, 16066-16083, 18325-18352, 20180-20200, and 21670-21689. Such an antigen-based vaccine can be useful for treating a patient who expresses the HLA allele B1510.

[0307] In particular embodiments, one or more HIV epitope sequences or one or more HIV epitope sequences encoded by HIV epitope encoding sequences that are selected for inclusion in an antigen-based vaccine can include any of SEQ ID NOs: 1267-1270, 3179-3183, 7297-7300, 9549-9551, 11723-11725, 13996-14005, 16084-16091, 18353-18358, 20201-20205, and 21690-21692. Such an antigen-based vaccine can be useful for treating a patient who expresses the HLA allele B1513.

[0308] In particular embodiments, one or more HIV epitope sequences or one or more HIV epitope sequences encoded by HIV epitope encoding sequences that are selected for inclusion in an antigen-based vaccine can include any of SEQ ID NOs: 1271-1286, 3184-3203, 7301-7328, 9552-9565, 11726-11742, 14006-14024, 16092-16107, 18359-18375, 20206-20224, and 21693-21705. Such an antigen-based vaccine can be useful for treating a patient who expresses the HLA allele B1801.

[0309] In particular embodiments, one or more HIV epitope sequences or one or more HIV epitope sequences encoded by HIV epitope encoding sequences that are selected for inclusion in an antigen-based vaccine can include any of SEQ ID NOs: 1287-1304, 3204-3225, 7329-7355, 9566-9594, 11743-11756, 14025-14048, 16108-16135, 18376-18408, 20225-20241, and 21706-21716. Such an antigen-based vaccine can be useful for treating a patient who expresses the HLA allele B2702.

[0310] In particular embodiments, one or more HIV epitope sequences or one or more HIV epitope sequences encoded by HIV epitope encoding sequences that are selected for inclusion in an antigen-based vaccine can include any of SEQ ID NOs: 1305-1319, 3226-3234, 7356-7370, 9595-9610, 11757-11771, 14049-14063, 16136-16145, 18409-18422, 20242-20254, and 21717-21723. Such an antigen-based vaccine can be useful for treating a patient who expresses the HLA allele B2705.

[0311] In particular embodiments, one or more HIV epitope sequences or one or more HIV epitope sequences encoded by HIV epitope encoding sequences that are selected for inclusion in an antigen-based vaccine can include any of SEQ ID NOs: 1320-1338, 3235-3260, 7371-7405, 9611-9641, 11772-11812, 14064-14095, 16146-16186, 18423-18463, 20255-20279, and 21724-21745. Such an antigen-based vaccine can be useful for treating a patient who expresses the HLA allele B3501.

[0312] In particular embodiments, one or more HIV epitope sequences or one or more HIV epitope sequences encoded by HIV epitope encoding sequences that are selected for inclusion in an antigen-based vaccine can include any of SEQ ID NOs: 1339-1349, 3261-3272, 7406-7424, 9642-9661, 11813-11833, 14096-14112, 16187-16205, 18464-18482, 20280-20291, and 21746-21754. Such an antigen-based vaccine can be useful for treating a patient who expresses the HLA allele B3502.

[0313] In particular embodiments, one or more HIV epitope sequences or one or more HIV epitope sequences encoded by HIV epitope encoding sequences that are selected for inclusion in an antigen-based vaccine can include any of SEQ ID NOs: 1350-1373, 3273-3298, 7425-7457, 9662-9697, 11834-11877, 14113-14148, 16206-16238, 18483-18513, 20292-20316, and 21755-21772. Such an antigen-based vaccine can be useful for treating a patient who expresses the HLA allele B3503.

[0314] In particular embodiments, one or more HIV epitope sequences or one or more HIV epitope sequences encoded by HIV epitope encoding sequences that are selected for inclusion in an antigen-based vaccine can include any of SEQ ID NOs: 1374-1386, 3299-3309, 7458-7477, 9698-9719, 11878-11899, 14149-14166, 16239-16256, 18514-18538, 20317-20331, and 21773-21786. Such an antigen-based vaccine can be useful for treating a patient who expresses the HLA allele B3508.

[0315] In particular embodiments, one or more HIV epitope sequences or one or more HIV epitope sequences encoded by HIV epitope encoding sequences that are selected for inclusion in an antigen-based vaccine can include any of SEQ ID NOs: 1387-1405, 3310-3326, 7478-7498, 9720-9744, 11900-11930, 14167-14185, 16257-16280, 18539-18560, 20332-20344, and 21787-21799. Such an antigen-based vaccine can be useful for treating a patient who expresses the HLA allele B3512.

[0316] In particular embodiments, one or more HIV epitope sequences or one or more HIV epitope sequences encoded by HIV epitope encoding sequences that are selected for inclusion in an antigen-based vaccine can include any of SEQ ID NOs: 1406-1425, 3327-3338, 7499-7512, 9745-9757, 11931-11944, 14186-14196, 16281-16291, 18561-18572, 20345-20359, and 21800-21808. Such an antigen-based vaccine can be useful for treating a patient who expresses the HLA allele B3701.

[0317] In particular embodiments, one or more HIV epitope sequences or one or more HIV epitope sequences encoded by HIV epitope encoding sequences that are selected for inclusion in an antigen-based vaccine can include any of SEQ ID NOs: 1426-1451, 3339-3367, 7513-7533, 9758-9782, 11945-11970, 14197-14219, 16292-16310, 18573-18599, 20360-20381, and 21809-21828. Such an antigen-based vaccine can be useful for treating a patient who expresses the HLA allele B3801.

[0318] In particular embodiments, one or more HIV epitope sequences or one or more HIV epitope sequences encoded by HIV epitope encoding sequences that are selected for inclusion in an antigen-based vaccine can include any of SEQ ID NOs: 1452-1476, 3368-3391, 7534-7551, 9783-9802, 11971-11992, 14220-14242, 16311-16323, 18600-18619, 20382-20395, and 21829-21844. Such an antigen-based vaccine can be useful for treating a patient who expresses the HLA allele B3901.

[0319] In particular embodiments, one or more HIV epitope sequences or one or more HIV epitope sequences encoded by HIV epitope encoding sequences that are selected for inclusion in an antigen-based vaccine can include any of SEQ ID NOs: 1477-1499, 3392-3423, 7552-7571, 9803-9831, 11993-12020, 14243-14277, 16324-16349, 18620-18653, 20396-20411, and 21845-21861. Such an antigen-based vaccine can be useful for treating a patient who expresses the HLA allele B3906.

[0320] In particular embodiments, one or more HIV epitope sequences or one or more HIV epitope sequences encoded by HIV epitope encoding sequences that are selected for inclusion in an antigen-based vaccine can include any of SEQ ID NOs: 1500-1527, 3424-3458, 7572-7614, 9832-9867, 12021-12057, 14278-14309, 16350-16384, 18654-18686, 20412-20431, and 21862-21888. Such an antigen-based vaccine can be useful for treating a patient who expresses the HLA allele B4001.

[0321] In particular embodiments, one or more HIV epitope sequences or one or more HIV epitope sequences encoded by HIV epitope encoding sequences that are selected for inclusion in an antigen-based vaccine can include any of SEQ ID NOs: 1528-1576, 3459-3497, 7615-7665, 9868-9913, 12058-12110, 14310-14359, 16385-16431, 18687-18736, 20432-20460, and 21889-21924). Such an antigen-based vaccine can be useful for treating a patient who expresses the HLA allele B4002.

[0322] In particular embodiments, one or more HIV epitope sequences or one or more HIV epitope sequences encoded by HIV epitope encoding sequences that are selected for inclusion in an antigen-based vaccine can include any of SEQ ID NOs: 1577-1593, 3498-3517, 7666-7689, 9914-9942, 12111-12136, 14360-14380, 16432-16463, 18737-18759, 20461-20479, and 21925-21940. Such an antigen-based vaccine can be useful for treating a patient who expresses the HLA allele B4006.

[0323] In particular embodiments, one or more HIV epitope sequences or one or more HIV epitope sequences encoded by HIV epitope encoding sequences that are selected for inclusion in an antigen-based vaccine can include any of SEQ ID NOs: 1594-1642, 3518-3554, 7690-7742, 9943-9988, 12137-12175, 14381-14429, 16437-16510, 18760-18811, 20480-20512, and 21941-21975. Such an antigen-based vaccine can be useful for treating a patient who expresses the HLA allele B4102.

[0324] In particular embodiments, one or more HIV epitope sequences or one or more HIV epitope sequences encoded by HIV epitope encoding sequences that are selected for inclusion in an antigen-based vaccine can include any of SEQ ID NOs: 1643-1663, 3555-3575, 7743-7772, 9989-10011, 12176-12202, 14430-14448, 16510-16527, 18812-18834, 20513-20530, and 21976-21992. Such an antigen-based vaccine can be useful for treating a patient who expresses the HLA allele B4402.

[0325] In particular embodiments, one or more HIV epitope sequences or one or more HIV epitope sequences encoded by HIV epitope encoding sequences that are selected for inclusion in an antigen-based vaccine can include any of SEQ ID NOs: 1664-1697, 3576-3611, 7773-7826, 10012-10058, 12203-12254, 14449-14493, 16528-16562, 18835-18883, 20531-20564, and 21993-22024. Such an antigen-based vaccine can be useful for treating a patient who expresses the HLA allele B4403.

[0326] In particular embodiments, one or more HIV epitope sequences or one or more HIV epitope sequences encoded by HIV epitope encoding sequences that are selected for inclusion in an antigen-based vaccine can include any of SEQ ID NOs: 1698-1745, 3612-3674, 7827-7903, 10059-10134, 12255-12327, 14494-14560, 16563-16633, 18884-18953, 20565-20613, and 22025-22067. Such an antigen-based vaccine can be useful for treating a patient who expresses the HLA allele B4405.

[0327] In particular embodiments, one or more HIV epitope sequences or one or more HIV epitope sequences encoded by HIV epitope encoding sequences that are selected for inclusion in an antigen-based vaccine can include any of SEQ ID NOs: 1746-1752, 3675-3679, 7904-7910, 10135-10146, 12328-12339, 14561-14574, 16634-16645, 18954-18957, 20614-20619, and 22068-22069. Such an antigen-based vaccine can be useful for treating a patient who expresses the HLA allele B4601.

[0328] In particular embodiments, one or more HIV epitope sequences or one or more HIV epitope sequences encoded by HIV epitope encoding sequences that are selected for inclusion in an antigen-based vaccine can include any of SEQ ID NOs: 1753-1785, 3680-3695, 7911-7926, 10147-10161, 12340-12359, 14575-14596, 16646-16664, 18958-18974, 20620-20636, and 22070-22081. Such an antigen-based vaccine can be useful for treating a patient who expresses the HLA allele B4801.

[0329] In particular embodiments, one or more HIV epitope sequences or one or more HIV epitope sequences encoded by HIV epitope encoding sequences that are selected for inclusion in an antigen-based vaccine can include any of SEQ ID NOs: 1786-1824, 3696-3719, 7927-7967, 10162-10207, 12360-12395, 14597-14634, 16665-16709, 18975-19013, 20637-20656, and 22082-22109. Such an antigen-based vaccine can be useful for treating a patient who expresses the HLA allele B4901.

[0330] In particular embodiments, one or more HIV epitope sequences or one or more HIV epitope sequences encoded by HIV epitope encoding sequences that are selected for inclusion in an antigen-based vaccine can include any of SEQ ID NOs: 1825-1855, 3720-3755, 7968-8008, 10208-10251, 12396-12438, 14635-14675, 16710-16748, 19014-19051, 20657-20682, and 22110-22129. Such an antigen-based vaccine can be useful for treating a patient who expresses the HLA allele B5001.

[0331] In particular embodiments, one or more HIV epitope sequences or one or more HIV epitope sequences encoded by HIV epitope encoding sequences that are selected for inclusion in an antigen-based vaccine can include any of SEQ ID NOs: 1856-1872, 3756-3789, 8009-8037, 10252-10287, 12439-12467, 14676-14708, 16749-16783, 19052-19076, 20683-20711, and 22130-22158. Such an antigen-based vaccine can be useful for treating a patient who expresses the HLA allele B5101.

[0332] In particular embodiments, one or more HIV epitope sequences or one or more HIV epitope sequences encoded by HIV epitope encoding sequences that are selected for inclusion in an antigen-based vaccine can include any of SEQ ID NOs: 1873-1900, 3790-3823, 8038-8075, 10288-10327, 12468-12507, 14709-14745, 16784-16826, 19077-19108, 207120-20748, and 22159-22178. Such an antigen-based vaccine can be useful for treating a patient who expresses the HLA allele B5401.

[0333] In particular embodiments, one or more HIV epitope sequences or one or more HIV epitope sequences encoded by HIV epitope encoding sequences that are selected for inclusion in an antigen-based vaccine can include any of SEQ ID NOs: 1901-1907, 3824-3827, 8076-8088, 10328-10341, 12508-12520, 14746-14756, 16827-16841, 19109-19113, 20749-20759, and 22179-22184. Such an antigen-based vaccine can be useful for treating a patient who expresses the HLA allele B5501.

[0334] In particular embodiments, one or more HIV epitope sequences or one or more HIV epitope sequences encoded by HIV epitope encoding sequences that are selected for inclusion in an antigen-based vaccine can include any of SEQ ID NOs: 1908-1924, 3828-3843, 8089-8109, 10342-10364, 12521-12543, 14757-14777, 16842-16867, 19114-19135, 20760-20785, and 22185-22194. Such an antigen-based vaccine can be useful for treating a patient who expresses the HLA allele B5502.

[0335] In particular embodiments, one or more HIV epitope sequences or one or more HIV epitope sequences encoded by HIV epitope encoding sequences that are selected for inclusion in an antigen-based vaccine can include any of SEQ ID NOs: 1925-1945, 3844-3865, 8110-8136, 10365-10392, 12544-12565, 14778-14802, 16868-16897, 19136-19156, 20786-20810, and 22195-22209. Such an antigen-based vaccine can be useful for treating a patient who expresses the HLA allele B5601.

[0336] In particular embodiments, one or more HIV epitope sequences or one or more HIV epitope sequences encoded by HIV epitope encoding sequences that are selected for inclusion in an antigen-based vaccine can include any of SEQ ID NOs: 1946-1985, 3866-3908, 8137-8188, 10393-10441, 12566-12606, 14803-14849, 16898-16956, 19157-19202, 20811-20848, and 22210-22234. Such an antigen-based vaccine can be useful for treating a patient who expresses the HLA allele B5701.

[0337] In particular embodiments, one or more HIV epitope sequences or one or more HIV epitope sequences encoded by HIV epitope encoding sequences that are selected for inclusion in an antigen-based vaccine can include any of SEQ ID NOs: 1986-2019, 3909-3942, 8189-8218, 10442-10467, 12607-12632, 14850-14873, 16957-16992, 19203-19232, 20849-20875, and 22235-22252. Such an antigen-based vaccine can be useful for treating a patient who expresses the HLA allele B5801.

[0338] In particular embodiments, one or more HIV epitope sequences or one or more HIV epitope sequences encoded by HIV epitope encoding sequences that are selected for inclusion in an antigen-based vaccine can include any of SEQ ID NOs: 2020-2026, 3943-3945, 8219-8224, 10468-10472, 12633-12644, 14874-14881, 16993-16996, 19233-19242, 20876-20880, and 22253-22255. Such an antigen-based vaccine can be useful for treating a patient who expresses the HLA allele C0102.

[0339] In particular embodiments, one or more HIV epitope sequences or one or more HIV epitope sequences encoded by HIV epitope encoding sequences that are selected for inclusion in an antigen-based vaccine can include any of SEQ ID NOs: 2027-2028, 3946-3947, 8225-8227, 10473-10476, 12645-12647, 14882-14887, 16997-16999, 19243-19245, 20881-20883, and 22256-22262. Such an antigen-based vaccine can be useful for treating a patient who expresses the HLA allele C0202.

[0340] In particular embodiments, one or more HIV epitope sequences or one or more HIV epitope sequences encoded by HIV epitope encoding sequences that are selected for inclusion in an antigen-based vaccine can include any of SEQ ID NOs: 2029-2034, 3948-3956, 8228-8233, 10477-10484, 12648-12657, 14888-14900, 17000-17007, 19246-19253, 20884-20888, and 22263-22266. Such an antigen-based vaccine can be useful for treating a patient who expresses the HLA allele C0302.

[0341] In particular embodiments, one or more HIV epitope sequences or one or more HIV epitope sequences encoded by HIV epitope encoding sequences that are selected for inclusion in an antigen-based vaccine can include any of SEQ ID NOs: 2035-2039, 3957-3962, 8234-8239, 10485-10491, 12658-12663, 14901-14911, 17008-17016, 19254-19257, 20889-20893, and 22267-22272. Such an antigen-based vaccine can be useful for treating a patient who expresses the HLA allele C0303.

[0342] In particular embodiments, one or more HIV epitope sequences or one or more HIV epitope sequences encoded by HIV epitope encoding sequences that are selected for inclusion in an antigen-based vaccine can include any of SEQ ID NOs: 2040-2047, 3963-3974, 8240-8250, 10492-10502, 12664-12676, 14912-14927, 17017-17029, 19258-19270, 20894-20901, and 22273-22274. Such an antigen-based vaccine can be useful for treating a patient who expresses the HLA allele C0304.

[0343] In particular embodiments, one or more HIV epitope sequences or one or more HIV epitope sequences encoded by HIV epitope encoding sequences that are selected for inclusion in an antigen-based vaccine can include any of SEQ ID NOs: 2048-2052, 3975-3979, 8251-8257, 10503-10505, 12677-12680, 14928-14932, 17030-17033, 19271-19277, 20902-20903, and 22275-22281. Such an antigen-based vaccine can be useful for treating a patient who expresses the HLA allele C0401.

[0344] In particular embodiments, one or more HIV epitope sequences or one or more HIV epitope sequences encoded by HIV epitope encoding sequences that are selected for inclusion in an antigen-based vaccine can include any of SEQ ID NOs: 2053-2057, 3980-3992, 8258-8262, 10506-10514, 12681-12692, 14933-14944, 17034-17041, 19278-19288, 20904-20911, and 22282-22283. Such an antigen-based vaccine can be useful for treating a patient who expresses the HLA allele C0501.

[0345] In particular embodiments, one or more HIV epitope sequences or one or more HIV epitope sequences encoded by HIV epitope encoding sequences that are selected for inclusion in an antigen-based vaccine can include any of SEQ ID NOs: 2058-2059, 3993-3995, 8263, 10515-10518, 12693-12697, 14945-14948, 17042-17045, 19289-19290, 20912-20913, 22284-22295). Such an antigen-based vaccine can be useful for treating a patient who expresses the HLA allele C0602.

[0346] In particular embodiments, one or more HIV epitope sequences or one or more HIV epitope sequences encoded by HIV epitope encoding sequences that are selected for inclusion in an antigen-based vaccine can include any of SEQ ID NOs: 8264 and 17046. Such an antigen-based vaccine can be useful for treating a patient who expresses the HLA allele C0701.

[0347] In particular embodiments, one or more HIV epitope sequences or one or more HIV epitope sequences encoded by HIV epitope encoding sequences that are selected for inclusion in an antigen-based vaccine can include any of SEQ ID NOs: 2060, 3996-3997, 12698, and 14949). Such an antigen-based vaccine can be useful for treating a patient who expresses the HLA allele C0702.

[0348] In particular embodiments, one or more HIV epitope sequences or one or more HIV epitope sequences encoded by HIV epitope encoding sequences that are selected for inclusion in an antigen-based vaccine can include any of SEQ ID NOs: 2061, 3998, 10519, and 17047. Such an antigen-based vaccine can be useful for treating a patient who expresses the HLA allele C0704.

[0349] In particular embodiments, one or more HIV epitope sequences or one or more HIV epitope sequences encoded by HIV epitope encoding sequences that are selected for inclusion in an antigen-based vaccine can include any of SEQ ID NOs: 2062-2079, 3999-4013, 8265-8274, 10520-10533, 12699-12721, 14950-14974, 17048-17069, 19291-19304, 20914-20923, and 22284-22295. Such an antigen-based vaccine can be useful for treating a patient who expresses the HLA allele C0801.

[0350] In particular embodiments, one or more HIV epitope sequences or one or more HIV epitope sequences encoded by HIV epitope encoding sequences that are selected for inclusion in an antigen-based vaccine can include any of SEQ ID NOs: 2080-2088, 4014-4031, 8275-8288, 10534-10545, 12722-12739, 14975-14987, 17070-1076, 19305-19321, 20924-20929, and 22296-22300). Such an antigen-based vaccine can be useful for treating a patient who expresses the HLA allele C0802.

[0351] In particular embodiments, one or more HIV epitope sequences or one or more HIV epitope sequences encoded by HIV epitope encoding sequences that are selected for inclusion in an antigen-based vaccine can include any of SEQ ID NOs: 2089-2100, 4032-4035, 8289-8295, 10546-10548, 12740-12742, 14988-14997, 17077-17079, 19322-19324, 20930-20938, and 22301-22304. Such an antigen-based vaccine can be useful for treating a patient who expresses the HLA allele C0803.

[0352] In particular embodiments, one or more HIV epitope sequences or one or more HIV epitope sequences encoded by HIV epitope encoding sequences that are selected for inclusion in an antigen-based vaccine can include any of SEQ ID NOs: 2101-2105, 4036-4043, 8296-8302, 10549-10555, 102743-12748, 14998-15007, 17080-17089, 19325-19332, 20939-20947, and 22305-22310. Such an antigen-based vaccine can be useful for treating a patient who expresses the HLA allele C1203.

[0353] In particular embodiments, one or more HIV epitope sequences or one or more HIV epitope sequences encoded by HIV epitope encoding sequences that are selected for inclusion in an antigen-based vaccine can include any of SEQ ID NOs: 2106-2122, 4044-4058, 8303-8329, 10556-10574, 12749-12763, 15008-15025, 17090-17108, 19333-19348, 20948-20962, and 22311-22320. Such an antigen-based vaccine can be useful for treating a patient who expresses the HLA allele C1402.

[0354] In particular embodiments, one or more HIV epitope sequences or one or more HIV epitope sequences encoded by HIV epitope encoding sequences that are selected for inclusion in an antigen-based vaccine can include any of SEQ ID NOs: 2123-2133, 4059-4069, 8330-8342, 10575-10587, 12764-12772 15026-15035, 17109-17124, 19349-19361, 20963-20970, and 22321-22327. Such an antigen-based vaccine can be useful for treating a patient who expresses the HLA allele C1403.

[0355] In particular embodiments, one or more HIV epitope sequences or one or more HIV epitope sequences encoded by HIV epitope encoding sequences that are selected for inclusion in an antigen-based vaccine can include any of SEQ ID NOs: 2134-2138, 4070-4074, 8343-8354, 10588-10591, 12773-12778, 15036-15040, 17125-17135, 19362-19366, 20971-20978, and 22328-22332. Such an antigen-based vaccine can be useful for treating a patient who expresses the HLA allele C1502.

[0356] In particular embodiments, one or more HIV epitope sequences or one or more HIV epitope sequences encoded by HIV epitope encoding sequences that are selected for inclusion in an antigen-based vaccine can include any of SEQ ID NOs: 2139-2143, 4075-4079, 8355-8358, 10592-10595, 12779-12782, 15041-15048, 17136-17144, 19367-19370, 20979-20983, and 22333-22334. Such an antigen-based vaccine can be useful for treating a patient who expresses the HLA allele C1601.

[0357] In particular embodiments, one or more HIV epitope sequences or one or more HIV epitope sequences encoded by HIV epitope encoding sequences that are selected for inclusion in an antigen-based vaccine can include any of SEQ ID NOs: 2144-2151, 4080-4089, 8359-8367, 10596-10602, 12783-12792, 15049-15058, 17145-17157, 19371-19376, 20984-20992, and 22335-22340. Such an antigen-based vaccine can be useful for treating a patient who expresses the HLA allele C1602.

[0358] In particular embodiments, one or more HIV epitope sequences or one or more HIV epitope sequences encoded by HIV epitope encoding sequences that are selected for inclusion in an antigen-based vaccine can include any of SEQ ID NOs: 2152-2160, 4090-4098, 8368-8381, 10603-10615, 12793-12803, 15059-15069, 17158-17165, 19377-19382, 20994-20998, and 22341-22345. Such an antigen-based vaccine can be useful for treating a patient who expresses the HLA allele C1604.

[0359] In particular embodiments, one or more HIV epitope sequences or one or more HIV epitope sequences encoded by HIV epitope encoding sequences that are selected for inclusion in an antigen-based vaccine can include any of SEQ ID NOs: 2161-2165, 4099-4106, 8382-8389, 10616-10626, 12804-12810, 15070-15079, 17166-17174, 19383-19388, 20999-21003, and 22346-22349. Such an antigen-based vaccine can be useful for treating a patient who expresses the HLA allele C1701.

[0360] In various embodiments, an antigen-based vaccine can be generated to include at least one HIV epitope sequence, or at least one HIV-epitope encoding sequence that encodes for the at least one HIV epitope sequence, that is predicted (e.g., as predicted by a presentation model) to most likely be presented by a HLA allele. In various embodiments, an antigen-based vaccine can include one or more HIV-epitope encoding sequences that encode for one or more HIV epitope sequences selected from any of SEQ ID NOs: 4178, 4178 and 5329, 5239, 756, 1594, 3184, 6851, 6936, 7773, 10970, 11027, 11028, 12508, 13291, 13768, 13838, 14597, 14874, 16634, 20396, 20480, and 21755. In various embodiments, an antigen-based vaccine can include one or more HIV epitope sequences selected from any of SEQ ID NOs: 4178, 4178 and 5329, 5239, 756, 1594, 3184, 6851, 6936, 7773, 10970, 11027, 11028, 12508, 13291, 13768, 13838, 14597, 14874, 16634, 20396, 20480, and 21755.

[0361] In various embodiments, an antigen-based vaccine can be generated for a particular HIV subtype. For example, all selected HIV epitopes are derived from a HIV subtype and are predicted to be presented by one or more HLA alleles. In various embodiments, the selected epitopes are from HIV subtype B and are predicted to be presented by frequently expressed HLA alleles (e.g., any of A0101, A0201, A0301, A1101, A2301, A2402, B0702, B0801, B3501, B4001, B4402, and B4403). Example epitope sequences and corresponding SEQ ID NOs that can be selected for HIV subtype B are shown below in Table 1:

TABLE 1
Candidate epitope sequences

| SEQ ID | HIV | Epitope | | HIV |
|---|---|---|---|---|
| NO: | Subtype | sequence | HLA | Protein |
| 4113 | B | GSEELRSLY | A0101 | gag |
| 4114 | B | VLAEAMSQV | A0201 | gag |
| 4115 | B | SLYNTVATL | A0201 | gag |
| 4427 | B | VTNSGAIMMQK | A0301 | gag |
| 4439 | B | NSATIMMQK | A0301 | gag |
| 4494 | B | VTNSATIMMQK | A1101 | gag |
| 4495 | B | NSGAIMMQK | A1101 | gag |
| 4545 | B | NYTNLIYTL | A2301 | env |
| 4561 | B | NYTSLIYTL | A2402 | env |
| 4956 | B | YPLTSLRSL | B0702 | gag |
| 4968 | B | TPQDLNTML | B0702 | gag |
| 4975 | B | YPLTALKSL | B0801 | gag |
| 4982 | B | ELKSLFNTV | B0801 | gag |
| 5259 | B | PPIPVGEIY | B3501 | gag |
| 5261 | B | NPPIPVGEIY | B3501 | gag |
| 5459 | B | IEIKDTKEAL | B4001 | gag |
| 5460 | B | IEVKDTKEAL | B4001 | gag |
| 5610 | B | AEQASQEVKNW | B4402 | gag |
| 5643 | B | TENSSQVSQNY | B4403 | gag |
| 5661 | B | QETIDKELY | B4403 | gag |

[0362] In various embodiments, an antigen-based vaccine can include one or more HIV epitope sequences selected from SEQ ID NOs: 4113, 4114, 4115, 4427, 4439, 4494, 4495, 4545, 4561, 4956, 4968, 4975, 4982, 5259, 5261, 5459, 5460, 5610, 5643, and 5661. In various embodiments, an antigen-based vaccine can include one or more HIV-epitope encoding sequences that encode for one or more HIV epitope sequences selected from SEQ ID NOs: 4113, 4114, 4115, 4427, 4439, 4494, 4495, 4545, 4561, 4956, 4968, 4975, 4982, 5259, 5261, 5459, 5460, 5610, 5643, and 5661. In various embodiments, an antigen-based vaccine can include two, three, four, five, six, seven, eight, nine, ten, eleven, twelve, thirteen, fourteen, fifteen, sixteen, seventeen, eighteen, nineteen, or twenty HIV epitope sequences selected from SEQ ID NOs: 4113, 4114, 4115, 4427, 4439, 4494, 4495, 4545, 4561, 4956, 4968, 4975, 4982, 5259, 5261, 5459, 5460, 5610, 5643, and 5661. In various embodiments, an antigen-based vaccine can include two, three, four, five, six, seven, eight, nine, ten, eleven, twelve, thirteen, fourteen, fifteen, sixteen, seventeen, eighteen, nineteen, or twenty HIV-epitope encoding sequences that encode for two, three, four, five, six, seven, eight, nine, ten, eleven, twelve, thirteen, fourteen, fifteen, sixteen, seventeen, eighteen, nineteen, or twenty HIV epitope sequences selected from SEQ ID NOs: 4113, 4114, 4115, 4427, 4439, 4494, 4495, 4545, 4561, 4956, 4968, 4975, 4982, 5259, 5261, 5459, 5460, 5610, 5643, and 5661.

[0363] V.B. Antigen Cassette

[0364] “Antigen cassette” refers to the combination of a selected antigen or plurality of antigens and the other regulatory elements necessary to transcribe the antigen(s) and express the transcribed product. An antigen or plurality of antigens can be operatively linked to regulatory components in a manner which permits transcription. Such components include conventional regulatory elements that can drive expression of the antigen(s) in a cell transfected with the viral vector. Thus the antigen cassette can also contain a selected promoter which is linked to the antigen(s) and located, with other, optional regulatory elements, within the selected viral sequences of the recombinant vector. Cassettes can include one or more antigens with epitope sequences selected from any one of SEQ ID Nos: 325-22349.

[0365] Useful promoters can be constitutive promoters or regulated (inducible) promoters, which will enable control of the amount of antigen(s) to be expressed. For example, a desirable promoter is that of the cytomegalovirus immediate early promoter/enhancer [see, e.g., Boshart et al, Cell, 41:521-530 (1985)]. Another desirable promoter includes the Rous sarcoma virus LTR promoter/enhancer. Still another promoter/enhancer sequence is the chicken cytoplasmic beta-actin promoter [T. A. Kost et al, Nucl. Acids Res., 11(23):8287 (1983)]. Other suitable or desirable promoters can be selected by one of skill in the art.

[0366] The antigen cassette can also include nucleic acid sequences heterologous to the viral vector sequences including sequences providing signals for efficient polyadenylation of the transcript (poly(A), poly-A or pA) and introns with functional splice donor and acceptor sites. A common poly-A sequence which is employed in the exemplary vectors of this invention is that derived from the papovavirus SV-40. The poly-A sequence generally can be inserted in the cassette following the antigen-based sequences and before the viral vector sequences. A common intron sequence can also be derived from SV-40, and is referred to as the SV-40 T intron sequence. An antigen cassette can also contain such an intron, located between the promoter/enhancer sequence and the antigen(s). Selection of these and other common vector elements are conventional [see, e.g., Sambrook et al, “Molecular Cloning. A Laboratory Manual.”, 2d edit., Cold Spring Harbor Laboratory, New York (1989) and references cited therein] and many such sequences are available from commercial and industrial sources as well as from Genbank.

[0367] An antigen cassette can have one or more antigens. For example, a given cassette can include 1-10, 1-20, 1-30, 10-20, 15-25, 15-20, 1, 2, 3, 4, 5, 6, 7, 8, 9, 10, 11, 12, 13, 14, 15, 16, 17, 18, 19, 20, or more antigens. Antigens can be linked directly to one another. Antigens can also be linked to one another with linkers. Antigens can be in any orientation relative to one another including N to C or C to N.

[0368] As above stated, the antigen cassette can be located in the site of any selected deletion in the viral vector, such as the site of the E1 gene region deletion or E3 gene region deletion, among others which may be selected.

[0369] The antigen cassette can be described using the following formula to describe the ordered sequence of each element, from 5′ to 3′:

(Pₐ-(L5_{b}-N_{c}-L3_{d})_{X})_{Z}-(P2ₕ-(G5ₑ-U_{f})_{Y})_{W}-G3_{g}

[0370] wherein P and P2 comprise promoter nucleotide sequences, N comprises an MHC class I epitope encoding nucleic acid sequence, L5 comprises a 5′ linker sequence, L3 comprises a 3′ linker sequence, G5 comprises a nucleic acid sequences encoding an amino acid linker, G3 comprises one of the at least one nucleic acid sequences encoding an amino acid linker, U comprises an MHC class II antigen-encoding nucleic acid sequence, where for each X the corresponding Nc is a epitope encoding nucleic acid sequence, where for each Y the corresponding Uf is an antigen-encoding nucleic acid sequence. The composition and ordered sequence can be further defined by selecting the number of elements present, for example where a=0 or 1, where b=0 or 1, where c=1, where d=0 or 1, where e=0 or 1, where f=1, where g=0 or 1, where h=0 or 1, X=1 to 400, Y=0, 1, 2, 3, 4 or 5, Z=1 to 400, and W=0, 1, 2, 3, 4 or 5.

[0371] In one example, elements present include where a=0, b=1, d=1, e=1, g=1, h=0, X=10, Y=2, Z=1, and W=1, describing where no additional promoter is present (i.e. only the promoter nucleotide sequence provided by the RNA alphavirus backbone is present), 20 MHC class I epitope are present, a 5′ linker is present for each N, a 3′ linker is present for each N, 2 MHC class II epitopes are present, a linker is present linking the two MHC class II epitopes, a linker is present linking the 5′ end of the two MHC class II epitopes to the 3′ linker of the final MHC class I epitope, and a linker is present linking the 3′ end of the two MHC class II epitopes to the to the RNA alphavirus backbone. Examples of linking the 3′ end of the antigen cassette to the RNA alphavirus backbone include linking directly to the 3′ UTR elements provided by the RNA alphavirus backbone, such as a 3′ 19-nt CSE. Examples of linking the 5′ end of the antigen cassette to the RNA alphavirus backbone include linking directly to a 26S promoter sequence, an alphavirus 5′ UTR, a 51-nt CSE, or a 24-nt CSE.

[0372] Other examples include: where a=1 describing where a promoter other than the promoter nucleotide sequence provided by the RNA alphavirus backbone is present; where a=1 and Z is greater than 1 where multiple promoters other than the promoter nucleotide sequence provided by the RNA alphavirus backbone are present each driving expression of 1 or more distinct MHC class I epitope encoding nucleic acid sequences; where h=1 describing where a separate promoter is present to drive expression of the MHC class II antigen-encoding nucleic acid sequences; and where g=0 describing the MHC class II antigen-encoding nucleic acid sequence, if present, is directly linked to the RNA alphavirus backbone.

[0373] Other examples include where each MHC class I epitope that is present can have a 5′ linker, a 3′ linker, neither, or both. In examples where more than one MHC class I epitope is present in the same antigen cassette, some MHC class I epitopes may have both a 5′ linker and a 3′ linker, while other MHC class I epitopes may have either a 5′ linker, a 3′ linker, or neither. In other examples where more than one MHC class I epitope is present in the same antigen cassette, some MHC class I epitopes may have either a 5′ linker or a 3′ linker, while other MHC class I epitopes may have either a 5′ linker, a 3′ linker, or neither.

[0374] In examples where more than one MHC class II epitope is present in the same antigen cassette, some MHC class II epitopes may have both a 5′ linker and a 3′ linker, while other MHC class II epitopes may have either a 5′ linker, a 3′ linker, or neither. In other examples where more than one MHC class II epitope is present in the same antigen cassette, some MHC class II epitopes may have either a 5′ linker or a 3′ linker, while other MHC class II epitopes may have either a 5′ linker, a 3′ linker, or neither.

[0375] The promoter nucleotide sequences P and/or P2 can be the same as a promoter nucleotide sequence provided by the RNA alphavirus backbone. For example, the promoter sequence provided by the RNA alphavirus backbone, Pn and P2, can each comprise a 26S subgenomic promoter. The promoter nucleotide sequences P and/or P2 can be different from the promoter nucleotide sequence provided by the RNA alphavirus backbone, as well as can be different from each other.

[0376] The 5′ linker L5 can be a native sequence or a non-natural sequence. Non-natural sequence include, but are not limited to, AAY, RR, and DPP. The 3′ linker L3 can also be a native sequence or a non-natural sequence. Additionally, L5 and L3 can both be native sequences, both be non-natural sequences, or one can be native and the other non-natural. For each X, the amino acid linkers can be 2, 3, 4, 5, 6, 7, 8, 9, 10, 11, 12, 13, 14, 15, 16, 17, 18, 19, 20, 21, 22, 23, 24, 25, 26, 27, 28, 29, 30, 31, 32, 33, 34, 35, 36, 37, 38, 39, 40, 41, 42, 43, 44, 45, 46, 47, 48, 49, 50, 51, 52, 53, 54, 55, 56, 57, 58, 59, 60, 61, 62, 63, 64, 65, 66, 67, 68, 69, 70, 71, 72, 73, 74, 75, 76, 77, 78, 79, 80, 81, 82, 83, 84, 85, 86, 87, 88, 89, 90, 91, 92, 93, 94, 95, 96, 97, 98, 99, 100 or more amino acids in length. For each X, the amino acid linkers can be also be at least 3, at least 4, at least 5, at least 6, at least 7, at least 8, at least 9, at least 10, at least 11, at least 12, at least 13, at least 14, at least 15, at least 16, at least 17, at least 18, at least 19, at least 20, at least 21, at least 22, at least 23, at least 24, at least 25, at least 26, at least 27, at least 28, at least 29, or at least 30 amino acids in length.

[0377] The amino acid linker G5, for each Y, can be 2, 3, 4, 5, 6, 7, 8, 9, 10, 11, 12, 13, 14, 15, 16, 17, 18, 19, 20, 21, 22, 23, 24, 25, 26, 27, 28, 29, 30, 31, 32, 33, 34, 35, 36, 37, 38, 39, 40, 41, 42, 43, 44, 45, 46, 47, 48, 49, 50, 51, 52, 53, 54, 55, 56, 57, 58, 59, 60, 61, 62, 63, 64, 65, 66, 67, 68, 69, 70, 71, 72, 73, 74, 75, 76, 77, 78, 79, 80, 81, 82, 83, 84, 85, 86, 87, 88, 89, 90, 91, 92, 93, 94, 95, 96, 97, 98, 99, 100 or more amino acids in length. For each Y, the amino acid linkers can be also be at least 3, at least 4, at least 5, at least 6, at least 7, at least 8, at least 9, at least 10, at least 11, at least 12, at least 13, at least 14, at least 15, at least 16, at least 17, at least 18, at least 19, at least 20, at least 21, at least 22, at least 23, at least 24, at least 25, at least 26, at least 27, at least 28, at least 29, or at least 30 amino acids in length.

[0378] The amino acid linker G3 can be 2, 3, 4, 5, 6, 7, 8, 9, 10, 11, 12, 13, 14, 15, 16, 17, 18, 19, 20, 21, 22, 23, 24, 25, 26, 27, 28, 29, 30, 31, 32, 33, 34, 35, 36, 37, 38, 39, 40, 41, 42, 43, 44, 45, 46, 47, 48, 49, 50, 51, 52, 53, 54, 55, 56, 57, 58, 59, 60, 61, 62, 63, 64, 65, 66, 67, 68, 69, 70, 71, 72, 73, 74, 75, 76, 77, 78, 79, 80, 81, 82, 83, 84, 85, 86, 87, 88, 89, 90, 91, 92, 93, 94, 95, 96, 97, 98, 99, 100 or more amino acids in length. G3 can be also be at least 3, at least 4, at least 5, at least 6, at least 7, at least 8, at least 9, at least 10, at least 11, at least 12, at least 13, at least 14, at least 15, at least 16, at least 17, at least 18, at least 19, at least 20, at least 21, at least 22, at least 23, at least 24, at least 25, at least 26, at least 27, at least 28, at least 29, or at least 30 amino acids in length.

[0379] For each X, each N can encode a MHC class I epitope 7-15 amino acids in length. For each X, each N can also encode a MHC class I epitope 5, 6, 7, 8, 9, 10, 11, 12, 13, 14, 15, 16, 17, 18, 19, 20, 21, 22, 23, 24, 25, 26, 27, 28, 29, or 30 amino acids in length. For each X, each N can also encodes a MHC class I epitope at least 5, at least 6, at least 7, at least 8, at least 9, at least 10, at least 11, at least 12, at least 13, at least 14, at least 15, at least 16, at least 17, at least 18, at least 19, at least 20, at least 21, at least 22, at least 23, at least 24, at least 25, at least 26, at least 27, at least 28, at least 29, or at least 30 amino acids in length.

[0380] V.C. Antigen Prioritization

[0381] More candidate antigens may be available for vaccine inclusion than the vaccine technology can support. Additionally, uncertainty about various aspects of the antigen analysis may remain and tradeoffs may exist between different properties of candidate vaccine antigens. Thus, in place of predetermined filters at each step of the selection process, an integrated multi-dimensional model can be considered that places candidate antigens in a space with at least the following axes and optimizes selection using an integrative approach.
[0382] 1. Risk of auto-immunity or tolerance (risk of germline) (lower risk of auto-immunity is typically preferred)
[0383] 2. Probability of sequencing artifact (lower probability of artifact is typically preferred)
[0384] 3. Probability of immunogenicity (higher probability of immunogenicity is typically preferred)
[0385] 4. Probability of presentation (higher probability of presentation is typically preferred)
[0386] 5. Gene expression (higher expression is typically preferred)
[0387] 6. Coverage of HLA genes (larger number of HLA molecules involved in the presentation of a set of antigens may lower the probability that HIV will escape immune attack via downregulation or mutation of HLA molecules)
[0388] 7. Coverage of HLA classes (covering both HLA-I and HLA-II may increase the probability of therapeutic response and decrease the probability of HIV escape)

[0389] Additionally, optionally, antigens can be deprioritized (e.g., excluded) from the vaccination if they are predicted to be presented by proteins corresponding to lost or inactivated HLA alleles. HLA allele loss can occur by either somatic mutation, loss of heterozygosity, or homozygous deletion of the locus. Methods for detection of HLA allele somatic mutation are well known in the art, e.g. (Shukla et al., 2015). Methods for detection of somatic LOH and homozygous deletion (including for HLA locus) are likewise well described. (Carter et al., 2012; McGranahan et al., 2017; Van Loo et al., 2010). Antigens can also be deprioritized if mass-spectrometry data indicates a predicted antigen is not presented by a predicted HLA allele.

[0390] V.D. Alphavirus

[0391] V.D.1. Alphavirus Biology

[0392] Alphaviruses are members of the family Togaviridae, and are positive-sense single stranded RNA viruses. Members are typically classified as either Old World, such as Sindbis, Ross River, Mayaro, Chikungunya, and Semliki Forest viruses, or New World, such as eastern equine encephalitis, Aura, Fort Morgan, or Venezuelan equine encephalitis virus and its derivative strain TC-83 (Strauss Microbrial Review 1994). A natural alphavirus genome is typically around 12 kb in length, the first two-thirds of which contain genes encoding non-structural proteins (nsPs) that form RNA replication complexes for self-replication of the viral genome, and the last third of which contains a subgenomic expression cassette encoding structural proteins for virion production (Frolov RNA 2001).

[0393] A model lifecycle of an alphavirus involves several distinct steps (Strauss Microbrial Review 1994, Jose Future Microbiol 2009). Following virus attachment to a host cell, the virion fuses with membranes within endocytic compartments resulting in the eventual release of genomic RNA into the cytosol. The genomic RNA, which is in a plus-strand orientation and comprises a 5′ methylguanylate cap and 3′ polyA tail, is translated to produce non-structural proteins nsP1-4 that form the replication complex. Early in infection, the plus-strand is then replicated by the complex into a minus-stand template. In the current model, the replication complex is further processed as infection progresses, with the resulting processed complex switching to transcription of the minus-strand into both full-length positive-strand genomic RNA, as well as the 26S subgenomic positive-strand RNA containing the structural genes. Several conserved sequence elements (CSEs) of alphavirus have been identified to potentially play a role in the various RNA replication steps including; a complement of the 5′ UTR in the replication of plus-strand RNAs from a minus-strand template, a 51-nt CSE in the replication of minus-strand synthesis from the genomic template, a 24-nt CSE in the junction region between the nsPs and the 26S RNA in the transcription of the subgenomic RNA from the minus-strand, and a 3′ 19-nt CSE in minus-strand synthesis from the plus-strand template.

[0394] Following the replication of the various RNA species, virus particles are then typically assembled in the natural lifecycle of the virus. The 26S RNA is translated and the resulting proteins further processed to produce the structural proteins including capsid protein, glycoproteins E1 and E2, and two small polypeptides E3 and 6K (Strauss 1994). Encapsidation of viral RNA occurs, with capsid proteins normally specific for only genomic RNA being packaged, followed by virion assembly and budding at the membrane surface.

[0395] V.D.2. Alphavirus as a Delivery Vector

[0396] Alphaviruses (including alphavirus sequences, features, and other elements) can be used to generate alphavirus-based delivery vectors (also be referred to as alphavirus vectors, alphavirus viral vectors, alphavirus vaccine vectors, self-replicating RNA (srRNA) vectors, or self-amplifying RNA (samRNA) vectors). Alphaviruses have previously been engineered for use as expression vector systems (Pushko 1997, Rheme 2004). Alphaviruses offer several advantages, particularly in a vaccine setting where heterologous antigen expression can be desired. Due to its ability to self-replicate in the host cytosol, alphavirus vectors are generally able to produce high copy numbers of the expression cassette within a cell resulting in a high level of heterologous antigen production. Additionally, the vectors are generally transient, resulting in improved biosafety as well as reduced induction of immunological tolerance to the vector. The public, in general, also lacks pre-existing immunity to alphavirus vectors as compared to other standard viral vectors, such as human adenovirus. Alphavirus based vectors also generally result in cytotoxic responses to infected cells. Cytotoxicity, to a certain degree, can be important in a vaccine setting to properly illicit an immune response to the heterologous antigen expressed. However, the degree of desired cytotoxicity can be a balancing act, and thus several attenuated alphaviruses have been developed, including the TC-83 strain of VEE. Thus, an example of an antigen expression vector described herein can utilize an alphavirus backbone that allows for a high level of antigen expression, elicits a robust immune response to antigen, does not elicit an immune response to the vector itself, and can be used in a safe manner. Furthermore, the antigen expression cassette can be designed to elicit different levels of an immune response through optimization of which alphavirus sequences the vector uses, including, but not limited to, sequences derived from VEE or its attenuated derivative TC-83.

[0397] Several expression vector design strategies have been engineered using alphavirus sequences (Pushko 1997). In one strategy, a alphavirus vector design includes inserting a second copy of the 26S promoter sequence elements downstream of the structural protein genes, followed by a heterologous gene (Frolov 1993). Thus, in addition to the natural non-structural and structural proteins, an additional subgenomic RNA is produced that expresses the heterologous protein. In this system, all the elements for production of infectious virions are present and, therefore, repeated rounds of infection of the expression vector in non-infected cells can occur.

[0398] Another expression vector design makes use of helper virus systems (Pushko 1997). In this strategy, the structural proteins are replaced by a heterologous gene. Thus, following self-replication of viral RNA mediated by still intact non-structural genes, the 26S subgenomic RNA provides for expression of the heterologous protein. Traditionally, additional vectors that expresses the structural proteins are then supplied in trans, such as by co-transfection of a cell line, to produce infectious virus. A system is described in detail in U.S. Pat. No. 8,093,021, which is herein incorporated by reference in its entirety, for all purposes. The helper vector system provides the benefit of limiting the possibility of forming infectious particles and, therefore, improves biosafety. In addition, the helper vector system reduces the total vector length, potentially improving the replication and expression efficiency. Thus, an example of an antigen expression vector described herein can utilize an alphavirus backbone wherein the structural proteins are replaced by an antigen cassette, the resulting vector both reducing biosafety concerns, while at the same time promoting efficient expression due to the reduction in overall expression vector size.

[0399] V.D.3. Alphavirus Production In Vitro

[0400] Alphavirus delivery vectors are generally positive-sense RNA polynucleotides. A convenient technique well-known in the art for RNA production is in vitro transcription (IVT). In this technique, a DNA template of the desired vector is first produced by techniques well-known to those in the art, including standard molecular biology techniques such as cloning, restriction digestion, ligation, gene synthesis, and polymerase chain reaction (PCR). The DNA template contains a RNA polymerase promoter at the 5′ end of the sequence desired to be transcribed into RNA. Promoters include, but are not limited to, bacteriophage polymerase promoters such as T3, T7, or SP6. The DNA template is then incubated with the appropriate RNA polymerase enzyme, buffer agents, and nucleotides (NTPs). The resulting RNA polynucleotide can optionally be further modified including, but limited to, addition of a 5′ cap structure such as 7-methylguanosine or a related structure, and optionally modifying the 3′ end to include a polyadenylate (polyA) tail. The RNA can then be purified using techniques well-known in the field, such as phenol-chloroform extraction.

[0401] V.D.4. Delivery Via Lipid Nanoparticle

[0402] An aspect to consider in vaccine vector design is immunity against the vector itself (Riley 2017). This may be in the form of preexisting immunity to the vector itself, such as with certain human adenovirus systems, or in the form of developing immunity to the vector following administration of the vaccine. The latter is an important consideration if multiple administrations of the same vaccine are performed, such as separate priming and boosting doses, or if the same vaccine vector system is to be used to deliver different antigen cassettes. For example, efficacy of foreign vectors may be reduced if those vectors are targeted by neutralizing antibodies.

[0403] An alternative strategy is the use of nanomaterials to deliver expression vectors (Riley 2017). Nanomaterial vehicles, importantly, can be made of non-immunogenic materials and generally avoid eliciting immunity to the delivery vector itself. These materials can include, but are not limited to, lipids, inorganic nanomaterials, and other polymeric materials. Lipids can be cationic, anionic, or neutral. The materials can be synthetic or naturally derived, and in some instances biodegradable. Lipids can include fats, cholesterol, phospholipids, lipid conjugates including, but not limited to, polyethyleneglycol (PEG) conjugates (PEGylated lipids), waxes, oils, glycerides, and fat soulable vitamins.

[0404] Lipid nanoparticles (LNPs) are an attractive delivery system due to the amphiphilic nature of lipids enabling formation of membranes and vesicle like structures (Riley 2017). In general, these vesicles deliver the expression vector by absorbing into the membrane of target cells and releasing nucleic acid into the cytosol. In addition, LNPs can be further modified or functionalized to facilitate targeting of specific cell types. Another consideration in LNP design is the balance between targeting efficiency and cytotoxicity. Lipid compositions generally include defined mixtures of cationic, neutral, anionic, and amphipathic lipids. In some instances, specific lipids are included to prevent LNP aggregation, prevent lipid oxidation, or provide functional chemical groups that facilitate attachment of additional moieties. Lipid composition can influence overall LNP size and stability. In an example, the lipid composition comprises dilinoleylmethyl-4-dimethylaminobutyrate (MC3) or MC3-like molecules. MC3 and MC3-like lipid compositions can be formulated to include one or more other lipids, such as a PEG or PEG-conjugated lipid, a sterol, or neutral lipids.

[0405] Nucleic-acid vectors, such as expression vectors, exposed directly to serum can have several undesirable consequences, including degradation of the nucleic acid by serum nucleases or off-target stimulation of the immune system by the free nucleic acids. Therefore, encapsulation of the alphavirus vector can be used to avoid degradation, while also avoiding potential off-target affects. In certain examples, an alphavirus vector is fully encapsulated within the delivery vehicle, such as within the aqueous interior of an LNP. Encapsulation of the alphavirus vector within an LNP can be carried out by techniques well-known to those skilled in the art, such as microfluidic mixing and droplet generation carried out on a microfluidic droplet generating device. Such devices include, but are not limited to, standard T-junction devices or flow-focusing devices. In an example, the desired lipid formulation, such as MC3 or MC3-like containing compositions, is provided to the droplet generating device in parallel with the alphavirus delivery vector and other desired agents, such that the delivery vector and desired agents are fully encapsulated within the interior of the MC3 or MC3-like based LNP. In an example, the droplet generating device can control the size range and size distribution of the LNPs produced. For example, the LNP can have a size ranging from 1 to 1000 nanometers in diameter, e.g., 1, 10, 50, 100, 500, or 1000 nanometers. Following droplet generation, the delivery vehicles encapsulating the expression vectors can be further treated or modified to prepare them for administration.

[0406] V.E. Chimpanzee Adenovirus (ChAd)

[0407] V.E.1. Viral Delivery with Chimpanzee Adenovirus

[0408] Vaccine compositions for delivery of one or more antigens can be created by providing adenovirus nucleotide sequences of chimpanzee origin, a variety of novel vectors, and cell lines expressing chimpanzee adenovirus genes. A nucleotide sequence of a chimpanzee C68 adenovirus (also referred to herein as ChAdV68) can be used in a vaccine composition for antigen delivery (See SEQ ID NO: 1). Use of C68 adenovirus derived vectors is described in further detail in U.S. Pat. No. 6,083,716, which is herein incorporated by reference in its entirety, for all purposes.

[0409] In a further aspect, provided herein is a recombinant adenovirus comprising the DNA sequence of a chimpanzee adenovirus such as C68 and an antigen cassette operatively linked to regulatory sequences directing its expression. The recombinant virus is capable of infecting a mammalian, preferably a human, cell and capable of expressing the antigen cassette product in the cell. In this vector, the native chimpanzee E1 gene, and/or E3 gene, and/or E4 gene can be deleted. An antigen cassette can be inserted into any of these sites of gene deletion. The antigen cassette can include an antigen against which a primed immune response is desired.

[0410] In another aspect, provided herein is a mammalian cell infected with a chimpanzee adenovirus such as C68.

[0411] In still a further aspect, a novel mammalian cell line is provided which expresses a chimpanzee adenovirus gene (e.g., from C68) or functional fragment thereof.

[0412] In still a further aspect, provided herein is a method for delivering an antigen cassette into a mammalian cell comprising the step of introducing into the cell an effective amount of a chimpanzee adenovirus, such as C68, that has been engineered to express the antigen cassette.

[0413] Still another aspect provides a method for eliciting an immune response in a mammalian host to treat HIV. The method can comprise the step of administering to the host an effective amount of a recombinant chimpanzee adenovirus, such as C68, comprising an antigen cassette that encodes one or more antigens from HIV against which the immune response is targeted.

[0414] Also disclosed is a non-simian mammalian cell that expresses a chimpanzee adenovirus gene obtained from the sequence of SEQ ID NO: 1. The gene can be selected from the group consisting of the adenovirus E1A, E1B, E2A, E2B, E3, E4, L1, L2, L3, L4 and L5 of SEQ ID NO: 1.

[0415] Also disclosed is a nucleic acid molecule comprising a chimpanzee adenovirus DNA sequence comprising a gene obtained from the sequence of SEQ ID NO: 1. The gene can be selected from the group consisting of said chimpanzee adenovirus E1A, E1B, E2A, E2B, E3, E4, L1, L2, L3, L4 and L5 genes of SEQ ID NO: 1. In some aspects the nucleic acid molecule comprises SEQ ID NO: 1. In some aspects the nucleic acid molecule comprises the sequence of SEQ ID NO: 1, lacking at least one gene selected from the group consisting of E1A, E1B, E2A, E2B, E3, E4, L1, L2, L3, L4 and L5 genes of SEQ ID NO: 1.

[0416] Also disclosed is a vector comprising a chimpanzee adenovirus DNA sequence obtained from SEQ ID NO: 1 and an antigen cassette operatively linked to one or more regulatory sequences which direct expression of the cassette in a heterologous host cell, optionally wherein the chimpanzee adenovirus DNA sequence comprises at least the cis-elements necessary for replication and virion encapsidation, the cis-elements flanking the antigen cassette and regulatory sequences. In some aspects, the chimpanzee adenovirus DNA sequence comprises a gene selected from the group consisting of E1A, E1B, E2A, E2B, E3, E4, L1, L2, L3, L4 and L5 gene sequences of SEQ ID NO: 1. In some aspects the vector can lack the E1A and/or E1B gene.

[0417] Also disclosed herein is a host cell transfected with a vector disclosed herein such as a C68 vector engineered to expression an antigen cassette. Also disclosed herein is a human cell that expresses a selected gene introduced therein through introduction of a vector disclosed herein into the cell.

[0418] Also disclosed herein is a method for delivering an antigen cassette to a mammalian cell comprising introducing into said cell an effective amount of a vector disclosed herein such as a C68 vector engineered to expression the antigen cassette.

[0419] Also disclosed herein is a method for producing an antigen comprising introducing a vector disclosed herein into a mammalian cell, culturing the cell under suitable conditions and producing the antigen.

[0420] V.E.2. E1-Expressing Complementation Cell Lines

[0421] To generate recombinant chimpanzee adenoviruses (Ad) deleted in any of the genes described herein, the function of the deleted gene region, if essential to the replication and infectivity of the virus, can be supplied to the recombinant virus by a helper virus or cell line, i.e., a complementation or packaging cell line. For example, to generate a replication-defective chimpanzee adenovirus vector, a cell line can be used which expresses the E1 gene products of the human or chimpanzee adenovirus; such a cell line can include HEK293 or variants thereof. The protocol for the generation of the cell lines expressing the chimpanzee E1 gene products (Examples 3 and 4 of U.S. Pat. No. 6,083,716) can be followed to generate a cell line which expresses any selected chimpanzee adenovirus gene.

[0422] An AAV augmentation assay can be used to identify a chimpanzee adenovirus E1-expressing cell line. This assay is useful to identify E1 function in cell lines made by using the E1 genes of other uncharacterized adenoviruses, e.g., from other species. That assay is described in Example 4B of U.S. Pat. No. 6,083,716.

[0423] A selected chimpanzee adenovirus gene, e.g., E1, can be under the transcriptional control of a promoter for expression in a selected parent cell line. Inducible or constitutive promoters can be employed for this purpose. Among inducible promoters are included the sheep metallothionine promoter, inducible by zinc, or the mouse mammary tumor virus (MMTV) promoter, inducible by a glucocorticoid, particularly, dexamethasone. Other inducible promoters, such as those identified in International patent application WO95/13392, incorporated by reference herein can also be used in the production of packaging cell lines. Constitutive promoters in control of the expression of the chimpanzee adenovirus gene can be employed also.

[0424] A parent cell can be selected for the generation of a novel cell line expressing any desired C68 gene. Without limitation, such a parent cell line can be HeLa [ATCC Accession No. CCL 2], A549 [ATCC Accession No. CCL 185], KB [CCL 17], Detroit [e.g., Detroit 510, CCL 72] and WI-38 [CCL 75] cells. Other suitable parent cell lines can be obtained from other sources. Parent cell lines can include CHO, HEK293 or variants thereof, 911, HeLa, A549, LP-293, PER.C6, or AE1-2a.

[0425] An E1-expressing cell line can be useful in the generation of recombinant chimpanzee adenovirus E1 deleted vectors. Cell lines constructed using essentially the same procedures that express one or more other chimpanzee adenoviral gene products are useful in the generation of recombinant chimpanzee adenovirus vectors deleted in the genes that encode those products. Further, cell lines which express other human Ad E1 gene products are also useful in generating chimpanzee recombinant Ads.

[0426] V.E.3. Recombinant Viral Particles as Vectors

[0427] The compositions disclosed herein can comprise viral vectors, that deliver at least one antigen to cells. Such vectors comprise a chimpanzee adenovirus DNA sequence such as C68 and an antigen cassette operatively linked to regulatory sequences which direct expression of the cassette. The C68 vector is capable of expressing the cassette in an infected mammalian cell. The C68 vector can be functionally deleted in one or more viral genes. An antigen cassette comprises at least one antigen under the control of one or more regulatory sequences such as a promoter. Optional helper viruses and/or packaging cell lines can supply to the chimpanzee viral vector any necessary products of deleted adenoviral genes.

[0428] The term “functionally deleted” means that a sufficient amount of the gene region is removed or otherwise altered, e.g., by mutation or modification, so that the gene region is no longer capable of producing one or more functional products of gene expression. Mutations or modifications that can result in functional deletions include, but are not limited to, nonsense mutations such as introduction of premature stop codons and removal of canonical and non-canonical start codons, mutations that alter mRNA splicing or other transcriptional processing, or combinations thereof. If desired, the entire gene region can be removed.

[0429] Modifications of the nucleic acid sequences forming the vectors disclosed herein, including sequence deletions, insertions, and other mutations may be generated using standard molecular biological techniques and are within the scope of this invention.

[0430] V.E.4. Construction of The Viral Plasmid Vector

[0431] The chimpanzee adenovirus C68 vectors include recombinant, defective adenoviruses, that is, chimpanzee adenovirus sequences functionally deleted in the Ela or E1 b genes, and optionally bearing other mutations, e.g., temperature-sensitive mutations or deletions in other genes. It is anticipated that these chimpanzee sequences are also useful in forming hybrid vectors from other adenovirus and/or adeno-associated virus sequences. Homologous adenovirus vectors prepared from human adenoviruses are described in the published literature [see, for example, Kozarsky I and II, cited above, and references cited therein, U.S. Pat. No. 5,240,846].

[0432] In the construction of useful chimpanzee adenovirus C68 vectors for delivery of an antigen cassette to a human (or other mammalian) cell, a range of adenovirus nucleic acid sequences can be employed in the vectors. A vector comprising minimal chimpanzee C68 adenovirus sequences can be used in conjunction with a helper virus to produce an infectious recombinant virus particle. The helper virus provides essential gene products required for viral infectivity and propagation of the minimal chimpanzee adenoviral vector. When only one or more selected deletions of chimpanzee adenovirus genes are made in an otherwise functional viral vector, the deleted gene products can be supplied in the viral vector production process by propagating the virus in a selected packaging cell line that provides the deleted gene functions in trans.

[0433] V.E.5. Recombinant Minimal Adenovirus

[0434] A minimal chimpanzee Ad C68 virus is a viral particle containing just the adenovirus cis-elements necessary for replication and virion encapsidation. That is, the vector contains the cis-acting 5′ and 3′ inverted terminal repeat (ITR) sequences of the adenoviruses (which function as origins of replication) and the native 5′ packaging/enhancer domains (that contain sequences necessary for packaging linear Ad genomes and enhancer elements for the E1 promoter). See, for example, the techniques described for preparation of a “minimal” human Ad vector in International Patent Application WO96/13597 and incorporated herein by reference.

[0435] V.E.6. Other Defective Adenoviruses

[0436] Recombinant, replication-deficient adenoviruses can also contain more than the minimal chimpanzee adenovirus sequences. These other Ad vectors can be characterized by deletions of various portions of gene regions of the virus, and infectious virus particles formed by the optional use of helper viruses and/or packaging cell lines.

[0437] As one example, suitable vectors may be formed by deleting all or a sufficient portion of the C68 adenoviral immediate early gene Ela and delayed early gene E1b, so as to eliminate their normal biological functions. Replication-defective E1-deleted viruses are capable of replicating and producing infectious virus when grown on a chimpanzee adenovirus-transformed, complementation cell line containing functional adenovirus Ela and E1b genes which provide the corresponding gene products in trans. Based on the homologies to known adenovirus sequences, it is anticipated that, as is true for the human recombinant E1-deleted adenoviruses of the art, the resulting recombinant chimpanzee adenovirus is capable of infecting many cell types and can express antigen(s), but cannot replicate in most cells that do not carry the chimpanzee E1 region DNA unless the cell is infected at a very high multiplicity of infection.

[0438] As another example, all or a portion of the C68 adenovirus delayed early gene E3 can be eliminated from the chimpanzee adenovirus sequence which forms a part of the recombinant virus.

[0439] Chimpanzee adenovirus C68 vectors can also be constructed having a deletion of the E4 gene. Still another vector can contain a deletion in the delayed early gene E2a.

[0440] Deletions can also be made in any of the late genes L1 through L5 of the chimpanzee C68 adenovirus genome. Similarly, deletions in the intermediate genes IX and IVa2 can be useful for some purposes. Other deletions may be made in the other structural or non-structural adenovirus genes.

[0441] The above discussed deletions can be used individually, i.e., an adenovirus sequence can contain deletions of E1 only. Alternatively, deletions of entire genes or portions thereof effective to destroy or reduce their biological activity can be used in any combination. For example, in one exemplary vector, the adenovirus C68 sequence can have deletions of the E1 genes and the E4 gene, or of the E1, E2a and E3 genes, or of the E1 and E3 genes, or of E1, E2a and E4 genes, with or without deletion of E3, and so on. As discussed above, such deletions can be used in combination with other mutations, such as temperature-sensitive mutations, to achieve a desired result.

[0442] The cassette comprising antigen(s) can be inserted optionally into any deleted region of the chimpanzee C68 Ad virus. Alternatively, the cassette can be inserted into an existing gene region to disrupt the function of that region, if desired.

[0443] V.E.7. Helper Viruses

[0444] Depending upon the chimpanzee adenovirus gene content of the viral vectors employed to carry the antigen cassette, a helper adenovirus or non-replicating virus fragment can be used to provide sufficient chimpanzee adenovirus gene sequences to produce an infective recombinant viral particle containing the cassette.

[0445] Useful helper viruses contain selected adenovirus gene sequences not present in the adenovirus vector construct and/or not expressed by the packaging cell line in which the vector is transfected. A helper virus can be replication-defective and contain a variety of adenovirus genes in addition to the sequences described above. The helper virus can be used in combination with the E1-expressing cell lines described herein.

[0446] For C68, the “helper” virus can be a fragment formed by clipping the C terminal end of the C68 genome with SspI, which removes about 1300 bp from the left end of the virus. This clipped virus is then co-transfected into an E1-expressing cell line with the plasmid DNA, thereby forming the recombinant virus by homologous recombination with the C68 sequences in the plasmid.

[0447] Helper viruses can also be formed into poly-cation conjugates as described in Wu et al, J. Biol. Chem., 264:16985-16987 (1989); K. J. Fisher and J. M. Wilson, Biochem. J., 299:49 (Apr. 1, 1994). Helper virus can optionally contain a reporter gene. A number of such reporter genes are known to the art. The presence of a reporter gene on the helper virus which is different from the antigen cassette on the adenovirus vector allows both the Ad vector and the helper virus to be independently monitored. This second reporter is used to enable separation between the resulting recombinant virus and the helper virus upon purification.

[0448] V.E.8. Assembly of Viral Particle and Infection of a Cell Line

[0449] Assembly of the selected DNA sequences of the adenovirus, the antigen cassette, and other vector elements into various intermediate plasmids and shuttle vectors, and the use of the plasmids and vectors to produce a recombinant viral particle can all be achieved using conventional techniques. Such techniques include conventional cloning techniques of cDNA, in vitro recombination techniques (e.g., Gibson assembly), use of overlapping oligonucleotide sequences of the adenovirus genomes, polymerase chain reaction, and any suitable method which provides the desired nucleotide sequence. Standard transfection and co-transfection techniques are employed, e.g., CaPO4 precipitation techniques or liposome-mediated transfection methods such as lipofectamine. Other conventional methods employed include homologous recombination of the viral genomes, plaquing of viruses in agar overlay, methods of measuring signal generation, and the like.

[0450] For example, following the construction and assembly of the desired antigen cassette-containing viral vector, the vector can be transfected in vitro in the presence of a helper virus into the packaging cell line. Homologous recombination occurs between the helper and the vector sequences, which permits the adenovirus-antigen sequences in the vector to be replicated and packaged into virion capsids, resulting in the recombinant viral vector particles.

[0451] The resulting recombinant chimpanzee C68 adenoviruses are useful in transferring an antigen cassette to a selected cell. In in vivo experiments with the recombinant virus grown in the packaging cell lines, the E1-deleted recombinant chimpanzee adenovirus demonstrates utility in transferring a cassette to a non-chimpanzee, preferably a human, cell.

[0452] V.E.9. Use of the Recombinant Virus Vectors

[0453] The resulting recombinant chimpanzee C68 adenovirus containing the antigen cassette thus provides an efficient gene transfer vehicle which can deliver antigen(s) to a subject in vivo or ex vivo.

[0454] The above-described recombinant vectors are administered to humans according to published methods for gene therapy. A chimpanzee viral vector bearing an antigen cassette can be administered to a patient, preferably suspended in a biologically compatible solution or pharmaceutically acceptable delivery vehicle, as described herein. A suitable vehicle includes sterile saline. Other aqueous and non-aqueous isotonic sterile injection solutions and aqueous and non-aqueous sterile suspensions known to be pharmaceutically acceptable carriers and well known to those of skill in the art may be employed for this purpose.

[0455] The chimpanzee adenoviral vectors are administered in sufficient amounts to transduce the human cells and to provide sufficient levels of antigen transfer and expression to provide a therapeutic benefit without undue adverse or with medically acceptable physiological effects, which can be determined by those skilled in the medical arts. Conventional and pharmaceutically acceptable routes of administration include, but are not limited to, direct delivery to the liver, intranasal, intravenous, intramuscular, subcutaneous, intradermal, oral and other parental routes of administration. Routes of administration may be combined, if desired.

[0456] Dosages of the viral vector will depend primarily on factors such as the condition being treated, the age, weight and health of the patient, and may thus vary among patients. The dosage will be adjusted to balance the therapeutic benefit against any side effects and such dosages may vary depending upon the therapeutic application for which the recombinant vector is employed. The levels of expression of antigen(s) can be monitored to determine the frequency of dosage administration.

[0457] Recombinant, replication defective adenoviruses can be administered in a “pharmaceutically effective amount”, that is, an amount of recombinant adenovirus that is effective in a route of administration to transfect the desired cells and provide sufficient levels of expression of the selected gene to provide a vaccinal benefit, i.e., some measurable level of protective immunity. C68 vectors comprising an antigen cassette can be co-administered with adjuvant. Adjuvant can be separate from the vector (e.g., alum) or encoded within the vector, in particular if the adjuvant is a protein. Adjuvants are well known in the art.

[0458] Conventional and pharmaceutically acceptable routes of administration include, but are not limited to, intranasal, intramuscular, intratracheal, subcutaneous, intradermal, rectal, oral and other parental routes of administration. Routes of administration may be combined, if desired, or adjusted depending upon the immunogen or the disease. For example, in prophylaxis of rabies, the subcutaneous, intratracheal and intranasal routes are preferred. The route of administration primarily will depend on the nature of the disease being treated.

[0459] The levels of immunity to antigen(s) can be monitored to determine the need, if any, for boosters. Following an assessment of antibody titers in the serum, for example, optional booster immunizations may be desired

[0460] V.F. Pharmaceutical Compositions

[0461] A vaccine composition can be a pharmaceutical composition that further comprises an adjuvant and/or a carrier. Examples of useful adjuvants and carriers are given herein below. A composition can be associated with a carrier such as a protein or an antigen-presenting cell such as a dendritic cell (DC) capable of presenting the peptide to a T-cell.

[0462] Adjuvants are any substance whose admixture into a vaccine composition increases or otherwise modifies the immune response to an antigen. Carriers can be scaffold structures, for example a polypeptide or a polysaccharide, to which an antigen, is capable of being associated. Optionally, adjuvants are conjugated covalently or non-covalently.

[0463] The ability of an adjuvant to increase an immune response to an antigen is typically manifested by a significant or substantial increase in an immune-mediated reaction, or reduction in disease symptoms. For example, an increase in humoral immunity is typically manifested by a significant increase in the titer of antibodies raised to the antigen, and an increase in T-cell activity is typically manifested in increased cell proliferation, or cellular cytotoxicity, or cytokine secretion. An adjuvant may also alter an immune response, for example, by changing a primarily humoral or Th response into a primarily cellular, or Th response.

[0464] Suitable adjuvants include, but are not limited to 1018 ISS, alum, aluminum salts, Amplivax, AS15, BCG, CP-870,893, CpG7909, CyaA, dSLIM, GM-CSF, IC30, IC31, Imiquimod, ImuFact IMP321, IS Patch, ISS, ISCOMATRIX, JuvImmune, LipoVac, MF59, monophosphoryl lipid A, Montanide IMS 1312, Montanide ISA 206, Montanide ISA 50V, Montanide ISA-51, OK-432, OM-174, OM-197-MP-EC, ONTAK, PepTel vector system, PLG microparticles, resiquimod, SRL172, Virosomes and other Virus-like particles, YF-17D, VEGF trap, R848, beta-glucan, Pam3Cys, Aquila's QS21 stimulon (Aquila Biotech, Worcester, Mass., USA) which is derived from saponin, mycobacterial extracts and synthetic bacterial cell wall mimics, and other proprietary adjuvants such as Ribi's Detox. Quil or Superfos. Adjuvants such as incomplete Freund's or GM-CSF are useful. Several immunological adjuvants (e.g., MF59) specific for dendritic cells and their preparation have been described previously (Dupuis M, et al., Cell Immunol. 1998; 186(1):18-27; Allison A C; Dev Biol Stand. 1998; 92:3-11). Also cytokines can be used. Several cytokines have been directly linked to influencing dendritic cell migration to lymphoid tissues (e.g., TNF-alpha), accelerating the maturation of dendritic cells into efficient antigen-presenting cells for T-lymphocytes (e.g., GM-CSF, IL-1 and IL-4) (U.S. Pat. No. 5,849,589, specifically incorporated herein by reference in its entirety) and acting as immunoadjuvants (e.g., IL-12) (Gabrilovich D I, et al., J Immunother Emphasis Tumor Immunol. 1996 (6):414-418).

[0465] CpG immunostimulatory oligonucleotides have also been reported to enhance the effects of adjuvants in a vaccine setting. Other TLR binding molecules such as RNA binding TLR 7, TLR 8 and/or TLR 9 may also be used.

[0466] Other examples of useful adjuvants include, but are not limited to, chemically modified CpGs (e.g. CpR, Idera), Poly(I:C)(e.g. polyi:C12U), non-CpG bacterial DNA or RNA as well as immunoactive small molecules and antibodies such as cyclophosphamide, sunitinib, bevacizumab, celebrex, NCX-4016, sildenafil, tadalafil, vardenafil, sorafinib, XL-999, CP-547632, pazopanib, ZD2171, AZD2171, ipilimumab, tremelimumab, and SC58175, which may act therapeutically and/or as an adjuvant. The amounts and concentrations of adjuvants and additives can readily be determined by the skilled artisan without undue experimentation. Additional adjuvants include colony-stimulating factors, such as Granulocyte Macrophage Colony Stimulating Factor (GM-CSF, sargramostim).

[0467] A vaccine composition can comprise more than one different adjuvant. Furthermore, a therapeutic composition can comprise any adjuvant substance including any of the above or combinations thereof. It is also contemplated that a vaccine and an adjuvant can be administered together or separately in any appropriate sequence.

[0468] A carrier (or excipient) can be present independently of an adjuvant. In some aspects, the carrier is present in conjunction with the adjuvant. The function of a carrier can for example be to increase the molecular weight to increase activity or immunogenicity, to confer stability, to increase the biological activity, or to increase serum half-life. Furthermore, a carrier can aid presenting peptides to T-cells. A carrier can be any suitable carrier known to the person skilled in the art, for example a protein or an antigen presenting cell. A carrier protein could be but is not limited to keyhole limpet hemocyanin, serum proteins such as transferrin, bovine serum albumin, human serum albumin, thyroglobulin or ovalbumin, immunoglobulins, or hormones, such as insulin or palmitic acid. For immunization of humans, the carrier is generally a physiologically acceptable carrier acceptable to humans and safe. However, tetanus toxoid and/or diptheria toxoid are suitable carriers. Alternatively, the carrier can be dextrans for example sepharose.

[0469] Additional examples of carriers can be acqueous carriers such as water, buffered water, 0.9% saline, 0.3% glycine, hyaluronic acid and the like. These compositions can be sterilized by conventional, well known sterilization techniques, or can be sterile filtered. The resulting aqueous solutions can be packaged for use as is, or lyophilized, the lyophilized preparation being combined with a sterile solution prior to administration. The compositions may contain pharmaceutically acceptable auxiliary substances as required to approximate physiological conditions, such as pH adjusting and buffering agents, tonicity adjusting agents, wetting agents and the like, for example, sodium acetate, sodium lactate, sodium chloride, potassium chloride, calcium chloride, sorbitan monolaurate, triethanolamine oleate, etc.

[0470] Cytotoxic T-cells (CTLs) recognize an antigen in the form of a peptide bound to an MHC molecule rather than the intact foreign antigen itself. The MHC molecule itself is located at the cell surface of an antigen presenting cell. Thus, an activation of CTLs is possible if a trimeric complex of peptide antigen, MHC molecule, and APC is present. Correspondingly, it may enhance the immune response if not only the peptide is used for activation of CTLs, but if additionally APCs with the respective MHC molecule are added. Therefore, in some embodiments a vaccine composition additionally contains at least one antigen presenting cell.

[0471] In some aspects, any of the above compositions further comprise a nanoparticulate delivery vehicle. The nanoparticulate delivery vehicle, in some aspects, may be a lipid nanoparticle (LNP) or liposomes. In some aspects, the LNP comprises ionizable amino lipids. In some aspects, the ionizable amino lipids comprise MC3-like (dilinoleylmethyl-4-dimethylaminobutyrate) molecules. In some aspects, the nanoparticulate delivery vehicle encapsulates the antigen expression system.

[0472] In some aspects, any of the above compositions further comprise a plurality of LNPs, wherein the LNPs comprise: the antigen expression system; a cationic lipid; a non-cationic lipid; and a conjugated lipid that inhibits aggregation of the LNPs, wherein at least about 95% of the LNPs in the plurality of LNPs either: have a non-lamellar morphology; or are electron-dense.

[0473] In some aspects, the non-cationic lipid is a mixture of (1) a phospholipid and (2) cholesterol or a cholesterol derivative.

[0474] In some aspects, the conjugated lipid that inhibits aggregation of the LNPs is a polyethyleneglycol (PEG)-lipid conjugate. In some aspects, the PEG-lipid conjugate is selected from the group consisting of: a PEG-diacylglycerol (PEG-DAG) conjugate, a PEG dialkyloxypropyl (PEG-DAA) conjugate, a PEG-phospholipid conjugate, a PEG-ceramide (PEG-Cer) conjugate, and a mixture thereof. In some aspects the PEG-DAA conjugate is a member selected from the group consisting of: a PEG-didecyloxypropyl (C₁₀) conjugate, a PEG-dilauryloxypropyl (C₁₂) conjugate, a PEG-dimyristyloxypropyl (C₁₄) conjugate, a PEG-dipalmityloxypropyl (C₁₆) conjugate, a PEG-distearyloxypropyl (C₁₈) conjugate, and a mixture thereof.

[0475] In some aspects, the antigen expression system is fully encapsulated in the LNPs.

[0476] In some aspects, the non-lamellar morphology of the LNPs comprises an inverse hexagonal (H_{II}) or cubic phase structure.

[0477] In some aspects, the cationic lipid comprises from about 10 mol % to about 50 mol % of the total lipid present in the LNPs. In some aspects, the cationic lipid comprises from about 20 mol % to about 50 mol % of the total lipid present in the LNPs. In some aspects, the cationic lipid comprises from about 20 mol % to about 40 mol % of the total lipid present in the LNPs.

[0478] In some aspects, the non-cationic lipid comprises from about 10 mol % to about 60 mol % of the total lipid present in the LNPs. In some aspects, the non-cationic lipid comprises from about 20 mol % to about 55 mol % of the total lipid present in the LNPs. In some aspects, the non-cationic lipid comprises from about 25 mol % to about 50 mol % of the total lipid present in the LNPs.

[0479] In some aspects, the conjugated lipid comprises from about 0.5 mol % to about 20 mol % of the total lipid present in the LNPs. In some aspects, the conjugated lipid comprises from about 2 mol % to about 20 mol % of the total lipid present in the LNPs. In some aspects, the conjugated lipid comprises from about 1.5 mol % to about 18 mol % of the total lipid present in the LNPs.

[0480] In some aspects, greater than 95% of the LNPs have a non-lamellar morphology. In some aspects, greater than 95% of the LNPs are electron dense.

[0481] In some aspects, any of the above compositions further comprise a plurality of LNPs, wherein the LNPs comprise: a cationic lipid comprising from 50 mol % to 65 mol % of the total lipid present in the LNPs; a conjugated lipid that inhibits aggregation of LNPs comprising from 0.5 mol % to 2 mol % of the total lipid present in the LNPs; and a non-cationic lipid comprising either: a mixture of a phospholipid and cholesterol or a derivative thereof, wherein the phospholipid comprises from 4 mol % to 10 mol % of the total lipid present in the LNPs and the cholesterol or derivative thereof comprises from 30 mol % to 40 mol % of the total lipid present in the LNPs; a mixture of a phospholipid and cholesterol or a derivative thereof, wherein the phospholipid comprises from 3 mol % to 15 mol % of the total lipid present in the LNPs and the cholesterol or derivative thereof comprises from 30 mol % to 40 mol % of the total lipid present in the LNPs; or up to 49.5 mol % of the total lipid present in the LNPs and comprising a mixture of a phospholipid and cholesterol or a derivative thereof, wherein the cholesterol or derivative thereof comprises from 30 mol % to 40 mol % of the total lipid present in the LNPs.

[0482] In some aspects, any of the above compositions further comprise a plurality of LNPs, wherein the LNPs comprise: a cationic lipid comprising from 50 mol % to 85 mol % of the total lipid present in the LNPs; a conjugated lipid that inhibits aggregation of LNPs comprising from 0.5 mol % to 2 mol % of the total lipid present in the LNPs; and a non-cationic lipid comprising from 13 mol % to 49.5 mol % of the total lipid present in the LNPs.

[0483] In some aspects, the phospholipid comprises dipalmitoylphosphatidylcholine (DPPC), distearoylphosphatidylcholine (DSPC), or a mixture thereof.

[0484] In some aspects, the conjugated lipid comprises a polyethyleneglycol (PEG)-lipid conjugate. In some aspects, the PEG-lipid conjugate comprises a PEG-diacylglycerol (PEG-DAG) conjugate, a PEG-dialkyloxypropyl (PEG-DAA) conjugate, or a mixture thereof. In some aspects, the PEG-DAA conjugate comprises a PEG-dimyristyloxypropyl (PEG-DMA) conjugate, a PEG-distearyloxypropyl (PEG-DSA) conjugate, or a mixture thereof. In some aspects, the PEG portion of the conjugate has an average molecular weight of about 2,000 daltons.

[0485] In some aspects, the conjugated lipid comprises from 1 mol % to 2 mol % of the total lipid present in the LNPs.

[0486] In some aspects, the LNP comprises a compound having a structure of Formula I:

[chemical structure]

or a pharmaceutically acceptable salt, tautomer, prodrug or stereoisomer thereof, wherein: L¹ and L² are each independently −0(C=0)-, —(C=0)0-, —C(=0)—, −0-, —S(0)ₓ-, —S—S—, —C(=0)S—, —SC(=0)—, —R^{a}C(=0)-, —C(=0)—, —R^{a}C(=0)—, —SC(=0)—, —R^{a}C(=0)0- or a direct bond; G¹ is Ci-C₂ alkylene, —(C=0)-, -0(C=0)-, —SC(=0)—, —R^{a}C(=0)- or a direct bond: —C(=0)—, —(C=0)0-, —C(=0)S—, —C(=0) R^{a}— or a direct bond; G is Ci-C₆ alkylene; R^{a} is H or C1-C12 alkyl; R^{1a} and R^{1b} are, at each occurrence, independently either: (a) H or C1-C12 alkyl; or (b) R^{1a} is H or C₁-C₁₂ alkyl, and R^{1b} together with the carbon atom to which it is bound is taken together with an adjacent R^{1b} and the carbon atom to which it is bound to form a carbon-carbon double bond; R^{2a} and R^{2b} are, at each occurrence, independently either: (a) H or C₁-C₁₂ alkyl; or (b) R^{2a} is H or C₁-C₁₂ alkyl, and R^{2b} together with the carbon atom to which it is bound is taken together with an adjacent R^{2b} and the carbon atom to which it is bound to form a carbon-carbon double bond; R^{3a} and R^{3b} are, at each occurrence, independently either (a): H or C₁-C₁₂ alkyl; or (b) R^{3a} is H or C₁-C₁₂ alkyl, and R^{3b} together with the carbon atom to which it is bound is taken together with an adjacent R and the carbon atom to which it is bound to form a carbon-carbon double bond; R^{4a} and R^{4b} are, at each occurrence, independently either: (a) H or C1-C12 alkyl; or (b) R^{4a} is H or C1-C12 alkyl, and R^{4b} together with the carbon atom to which it is bound is taken together with an adjacent R^{4b} and the carbon atom to which it is bound to form a carbon-carbon double bond; R⁵ and R⁶ are each independently H or methyl; R⁷ is C4-C20 alkyl; R⁸ and R⁹ are each independently C1-C12 alkyl; or R⁸ and R⁹, together with the nitrogen atom to which they are attached, form a 5, 6 or 7-membered heterocyclic ring; a, b, c and d are each independently an integer from 1 to 24; and x is 0, 1 or 2.

[0487] In some aspects, the LNP comprises a compound having a structure of Formula II:

[chemical structure]

or a pharmaceutically acceptable salt, tautomer, prodrug or stereoisomer thereof, wherein: L¹ and L² are each independently −0(C=0)-, —(C=0)0- or a carbon-carbon double bond; R^{1a} and R^{1b} are, at each occurrence, independently either (a) H or C₁-C₁₂ alkyl, or (b) R^{1a} is H or C₁-C₁₂ alkyl, and R^{1b} together with the carbon atom to which it is bound is taken together with an adjacent R^{1b} and the carbon atom to which it is bound to form a carbon-carbon double bond; R^{2a} and R^{2b} are, at each occurrence, independently either (a) H or C₁-C₁₂ alkyl, or (b) R₂ₐ is H or C₁-C₁₂ alkyl, and R^{2b} together with the carbon atom to which it is bound is taken together with an adjacent R^{2b} and the carbon atom to which it is bound to form a carbon-carbon double bond; R^{1a} and R^{3b} are, at each occurrence, independently either (a) H or C₁-C₁₂ alkyl, or (b) R^{1a} is H or C₁-C₁₂ alkyl, and R^{3b} together with the carbon atom to which it is bound is taken together with an adjacent R^{3b} and the carbon atom to which it is bound to form a carbon-carbon double bond; R^{4a} and R^{4b} are, at each occurrence, independently either (a) H or C₁-C₁₂ alkyl, or (b) R^{4a} is H or C₁-C₁₂ alkyl, and R^{4b} together with the carbon atom to which it is bound is taken together with an adjacent R^{4b} and the carbon atom to which it is bound to form a carbon-carbon double bond; R⁵ and R⁶ are each independently methyl or cycloalkyl; R⁷ is, at each occurrence, independently H or C₁-C₁₂ alkyl; R⁸ and R⁹ are each independently unsubstituted C1-C12 alkyl; or R⁸ and R⁹, together with the nitrogen atom to which they are attached, form a 5, 6 or 7-membered heterocyclic ring comprising one nitrogen atom; a and d are each independently an integer from 0 to 24; b and c are each independently an integer from 1 to 24; and e is 1 or 2, provided that: at least one of R^{1a}, R^{2a}, R^{3a} or R^{4a} is C1-C12 alkyl, or at least one of L¹ or L² is −0(C=0)- or —(C=0)0-; and R^{1a} and R^{1b} are not isopropyl when a is 6 or n-butyl when a is 8.

[0488] In some aspects, any of the above compositions further comprise one or more excipients comprising a neutral lipid, a steroid, and a polymer conjugated lipid. In some aspects, the neutral lipid comprises at least one of 1,2-Distearoyl-sn-glycero-3-phosphocholine (DSPC), 1,2-Dipalmitoyl-sn-glycero-3-phosphocholine (DPPC), 1,2-Dimyristoyl-sn-glycero-3-phosphocholine (DMPC), 1-Palmitoyl-2-oleoyl-sn-glycero-3-phosphocholine (POPC), 1,2-dioleoyl-sn-glycero-3-phosphocholine (DOPC), and 1,2-Dioleoyl-sn-glycero-3-phosphoethanolamine (DOPE). In some aspects, the neutral lipid is DSPC.

[0489] In some aspects, the molar ratio of the compound to the neutral lipid ranges from about 2:1 to about 8:1.

[0490] In some aspects, the steroid is cholesterol. In some aspects, the molar ratio of the compound to cholesterol ranges from about 2:1 to 1:1.

[0491] In some aspects, the polymer conjugated lipid is a pegylated lipid. In some aspects, the molar ratio of the compound to the pegylated lipid ranges from about 100:1 to about 25:1. In some aspects, the pegylated lipid is PEG-DAG, a PEG polyethylene (PEG-PE), a PEG-succinoyl-diacylglycerol (PEG-S-DAG), PEG-cer or a PEG dialkyoxypropylcarbamate. In some aspects, the pegylated lipid has the following structure III:

[chemical structure]

or a pharmaceutically acceptable salt, tautomer or stereoisomer thereof, wherein: R¹⁰ and R¹¹ are each independently a straight or branched, saturated or unsaturated alkyl chain containing from 10 to 30 carbon atoms, wherein the alkyl chain is optionally interrupted by one or more ester bonds; and z has a mean value ranging from 30 to 60. In some aspects, R¹⁰ and R¹¹ are each independently straight, saturated alkyl chains having 12 to 16 carbon atoms. In some aspects, the average z is about 45.

[0492] In some aspects, the LNP self-assembles into non-bilayer structures when mixed with polyanionic nucleic acid. In some aspects, the non-bilayer structures have a diameter between 60 nm and 120 nm. In some aspects, the non-bilayer structures have a diameter of about 70 nm, about 80 nm, about 90 nm, or about 100 nm. In some aspects, wherein the nanoparticulate delivery vehicle has a diameter of about 100 nm.

[0493] In some aspects, a targeting ligand can be included with the lipid nanoparticle. For example, the targeting ligand can be incorporated into the liposome and can include antibodies or fragments thereof specific for cell surface determinants of the desired immune system cells.

[0494] Also disclosed herein is a pharmaceutical composition comprising any of the compositions disclosed herein (such as an alphavirus-based or ChAd-based vector disclosed herein) and a pharmaceutically acceptable adjuvant and/or carrier.

### VI. Therapeutic Methods

[0495] Also provided is a method of inducing a HIV specific immune response in a subject, vaccinating against HIV (e.g., a prophylactic treatment), treating and or alleviating a symptom of HIV in a subject by administering to the subject one or more antigens such as a plurality of antigens identified using methods disclosed herein.

[0496] In some aspects, a subject has been diagnosed with HIV, at risk of contracting HIV, or at risk of exposure to HIV. A subject can be a human, dog, cat, horse or any animal in which a HIV specific immune response is desired.

[0497] A vaccine composition can be administered such that the amount of one or more antigens in the vaccine composition is sufficient to induce a CTL response.

[0498] A vaccine composition can be administered alone or in combination with other therapeutic agents. A therapeutic agent is for example, anti-retrovirals such as nucleoside reverse transcriptase inhibitors (NRTIs), nonnucleoside reverse transcriptase inhibitors (NNRTIs), protease inhibitors (PIs), fusion inhibitors, Entry inhibitors—CCr5 co-receptor antagonist, or HIV integrase strand transfer inhibitors.

[0499] The optimum amount of each antigen to be included in a vaccine composition and the optimum dosing regimen can be determined. For example, an antigen or its variant can be prepared for intravenous (i.v.) injection, sub-cutaneous (s.c.) injection, intradermal (i.d.) injection, intraperitoneal (i.p.) injection, intramuscular (i.m.) injection, parenteral, topical, nasal, oral, or local administration. Methods of injection include s.c., i.d., i.p., i.m., and i.v. Methods of DNA or RNA injection include i.d., i.m., s.c., i.p. and i.v. Other methods of administration of the vaccine composition are known to those skilled in the art.

[0500] Compositions comprising an antigen can be administered to an individual already suffering from HIV. In therapeutic applications, compositions are administered to a patient in an amount sufficient to elicit an effective CTL response to the HIV antigen and to cure or at least partially arrest symptoms, complications, and/or progression of HIV. An amount adequate to accomplish this is defined as “therapeutically effective dose.” Amounts effective for this use will depend on, e.g., the composition, the manner of administration, the stage and severity of HIV being treated, the weight and general state of health of the patient, and the judgment of the prescribing physician. In some instances, the vaccine composition can be administered sequentially where subsequent administrations represent boosting doses. Such boosting doses can be further administered until at least symptoms are substantially abated and for a period.

[0501] A vaccine can be compiled so that the selection, number and/or amount of antigens present in the composition is specific for a particular category, type, or subtype of HIV and specific for a patient. Additionally, the selection can be dependent on the status (e.g., early stage or late stage) of the disease, earlier treatment regimens, the immune status of the patient, and the HLA-haplotype of the patient. Furthermore, a vaccine can contain individualized components, according to personal needs of the particular patient. Examples include varying the selection of antigens according to the expression of the antigen in the particular patient or adjustments for secondary treatments following a first round or scheme of treatment.

### VII. Selecting a Subject for Administering an Antigen-Based Vaccine

[0502] A subject can be identified as a candidate for receiving an antigen-based vaccine through the use of various diagnostic methods. Reference is made to FIG. 34 depicts a flow process 3400 for providing an antigen-based vaccine to the subject, in accordance with one embodiment.

[0503] In one aspect, patient selection for antigen vaccination is performed by considering the subject's HLA type. In one aspect, patient selection for antigen vaccination is performed by considering a HIV subtype that the subject was exposed to or will likely become exposed to. In some aspects, patient selection for antigen vaccination is performed by considering both 1) the subject's HLA type and 2) a HIV subtype that the subject was exposed to or will likely become exposed to.

[0504] As an example, a subject is considered eligible for the vaccine therapy if 1) the subject carries an HLA allele predicted or known to present an antigen with an epitope sequence included in a vaccine, and 2) the subject was exposed to a HIV subtype that expresses the antigen with the epitope sequence. As another example, the subject is considered eligible for the vaccine therapy if 1) the subject carries an HLA allele predicted or known to present an antigen with an epitope sequence included in a vaccine, and 2) the patient is susceptible to exposure to a particular HIV subtype that expresses the antigen with the epitope sequence.

[0505] VII.A. Isolation and Detection of HLA Peptides

[0506] At step 3410, whether the subject expresses one or more HLA alleles is determined. In one aspect, the one or more HLA alleles are class I HLA alleles, class II HLA alleles, or both class I and class II HLA alleles.

[0507] In one aspect, determining whether the subject expresses one or more HLA alleles involves a population-based analysis. More specifically, determining whether the subject expresses one or more HLA alleles includes determining the origin of the subject and further identifying one or more HLA alleles that are known to be commonly expressed by the population of individuals of that origin. Examples of an origin can be ethnicity, geographic location, birth location, or ancestry. In one embodiment, an HLA allele is considered commonly expressed by the population of individuals of an origin if there is a greater than 95% chance that an individual of that origin expresses that HLA allele. In some embodiments, an HLA allele is considered commonly expressed by the population of individuals of an origin if there is a greater than a 50, 55, 60, 65, 70, 75, 80, 85, or 90% chance that an individual of that origin expresses that HLA allele. For example, a subject is determined to be of European origin and individuals of European origin are known to express one or more HLA alleles. Thus, the subject of European origin is determined to express the known one or more HLA alleles expressed by individuals of European origin. Common expression of HLA alleles based on an origin can be found in available databases such as http://www.ebi.ac.uk/imgt/hla/ambig.html.

[0508] In one aspect, determining whether the subject expresses one or more HLA alleles involves identifying the haplotype of the patient though high-throughput sequencing or Sanger sequencing diagnostic methods. Example patient haplotypes are documented in the column entitled “HLA alleles” in Tables 35-45. First, isolation of HLA-peptide molecules is performed using classic immunoprecipitation (IP) methods on a sample. In some aspects, the sample is a tissue sample and prior to IP, the tissue sample is lysed and solubilized. A clarified lysate is used for HLA specific IP.

[0509] Immunoprecipitation is performed using antibodies coupled to beads where the antibody is specific for HLA molecules. For a pan-Class I HLA immunoprecipitation, a pan-Class I CR antibody is used, for Class II HLA-DR, an HLA-DR antibody is used. Antibody is covalently attached to NHS-sepharose beads during overnight incubation. After covalent attachment, the beads were washed and aliquoted for IP. Immunoprecipitations can also be performed with antibodies that are not covalently attached to beads. Typically this is done using sepharose or magnetic beads coated with Protein A and/or Protein G to hold the antibody to the column. Some antibodies that can be used to selectively enrich MHC/peptide complex are listed below.

| Antibody Name | Specificity |
|---|---|
| W6/32 | Class I HLA-A, B, C |
| L243 | Class II-HLA-DR |
| Tu36 | Class II-HLA-DR |
| LN3 | Class II-HLA-DR |
| Tu39 | Class II-HLA-DR, DP, DQ |

[0510] The clarified tissue lysate is added to the antibody beads for the immunoprecipitation. After immunoprecipitation, the beads are removed from the lysate and the lysate stored for additional experiments, including additional IPs. The IP beads are washed to remove non-specific binding and the HLA/peptide complex is eluted from the beads using standard techniques. The protein components are removed from the peptides using a molecular weight spin column or C18 fractionation. The resultant peptides are taken to dryness by SpeedVac evaporation and in some instances are stored at −20 C prior to MS analysis.

[0511] Dried peptides are reconstituted in an HPLC buffer suitable for reverse phase chromatography and loaded onto a C-18 microcapillary HPLC column for gradient elution in a Fusion Lumos mass spectrometer (Thermo). MS1 spectra of peptide mass/charge (m/z) were collected in the Orbitrap detector at high resolution followed by MS2 low resolution scans collected in the ion trap detector after HCD fragmentation of the selected ion. Additionally, MS2 spectra can be obtained using either CID or ETD fragmentation methods or any combination of the three techniques to attain greater amino acid coverage of the peptide. MS2 spectra can also be measured with high resolution mass accuracy in the Orbitrap detector.

[0512] MS2 spectra from each analysis are searched against a protein database using Comet and the peptide identification are scored using Percolator. Additional sequencing is performed using PEAKS studio (Bioinformatics Solutions Inc.) and other search engines or sequencing methods can be used including spectral matching and de novo sequencing.

[0513] In one aspect, the subject is deemed to be expressing an HLA allele if the HLA allele has an HLA frequency of at least 0.5%. In some aspects, the subject deemed to be expressing an HLA allele if the HLA allele has a HLA frequency of at least 1%, 2%, 3%, 4%, or 5%.

[0514] VII.B.1. MS Limit of Detection Studies in Support of Comprehensive HLA Peptide Sequencing.

[0515] Using the peptide YVYVADVAAK (SEQ ID NO: 94), it was determined what the limits of detection are using different amounts of peptide loaded onto the LC column. The amounts of peptide tested were 1 μmol, 100 fmol, 10 fmol, 1 fmol, and 100 amol. (Table 2) The results are shown in FIGS. 19A and 19B. These results indicate that the lowest limit of detection (LoD) is in the attomol range (10⁻¹⁸), that the dynamic range spans five orders of magnitude, and that the signal to noise appears sufficient for sequencing at low femtomol ranges (10⁻¹⁵).

TABLE 2

| Peptide m/z | Loaded on Column | Copies/Cell in 1e9cells |
|---|---|---|
| 566.830 | 1 pmol | 600 |
| 562.823 | 100 fmol | 60 |
| 559.816 | 10 fmol | 6 |
| 556.810 | 1 fmol | 0.6 |
| 553.802 | 100 amol | 0.06 |

[0516] VII.B. Identifying HIV Subtype

[0517] Returning to FIG. 34, at step 3420, a HIV subtype that the subject has been exposed to or a HIV subtype that the subject is susceptible to is identified.

[0518] To identify a HIV subtype that a subject has been exposed to, a test sample is obtained from the subject. The test sample can be any of blood, seminal fluid, ocular lens fluid, cerebral spinal fluid, saliva, synovial fluid, peritoneal fluid, amniotic fluid, tissue, or needle aspirate. A HIV isolate is extracted from the test sample. In one aspect, extraction includes separating cellular components in the test sample from HIV isolate through centrifugation and the HIV isolate can be retained in the supernatant. In one aspect, extraction includes lysing and solubilizing the test sample. The lysate can be further clarified (e.g., centrifuged/filtered) to obtain a HIV isolate.

[0519] Detection of the HIV subtype in the HIV isolates can be conducted using enzyme-linked immunosorbent assay (ELBA), dot blot assays, HIV spot and comb tests, immunofluorescence tests, or Western blot. In some aspects, detection of the subtype in the HIV isolate is conducted by amplifying the viral nucleic acid in the HIV isolates (e.g., polymerase chain reaction). The HIV isolates are mixed with amplification reagents and a set of primers to amplify target sequences of the particular HIV subtype. The amplified target sequences can then be detected using a variety of detection technologies. For example, exposure of the target sequences to probes would form a probe/sequence product, which can be further detected as an indication of the presence of a particular HIV subtype. Example primers and probes for detecting particular HIV subtypes are described in WO 2003020878, which is hereby incorporated by reference in its entirety.

[0520] A patient can be susceptible to exposure to a particular HIV subtype based on the prevalence of HIV subtypes at the patient's current geographic location or the patient's future, planned geographic destination. For example, a patient can be susceptible to HIV subtype A1 and A2 if the patient is located at or planning to travel to Central and East African countries. A patient can be susceptible to HIV subtype B if the patient is located at or planning to travel to West and Central Europe, North or South America, Australia, or Southeast Asia. A patient can be susceptible to HIV subtype C if the patient is located at or planning to travel to Sub-Saharan Africa, India, or Brazil. A patient can be susceptible to HIV subtype D if the patient is located at or planning to travel to North Africa or the Middle East. A patient can be susceptible to HIV subtype F1 or F2 if the patient is located at or planning to travel to South or Southeast Asia. A patient can be susceptible to HIV subtype G if the patient is located at or planning to travel to West or Central Africa. A patient can be susceptible to HIV subtypes H if the patient is located at or planning to travel to Central Africa. A patient can be susceptible to HIV subtype J if the patient is located at or planning to travel to North, Central, or West Africa, or the Caribbean. A patient can be susceptible to HIV subtype K if the patient is located at or planning to travel to the Democratic Republic of Congo or Cameroon.

[0521] In some embodiments, an understanding of the HIV subtype is not needed and therefore, step 3420 need not be performed. For example, if a vaccine includes sufficient antigens such that the vaccine can be predicted to be efficacious against multiple HIV subtypes, then identification if the particular HIV subtype for this subject is not needed.

[0522] VII.C. Candidate Patient

[0523] Returning to FIG. 34, at step 3430, the subject is identified as a candidate for receiving an antigen-based vaccine. Generally, the subject is identified as a candidate if the subject expresses a HLA allele (determined at step 3410) and the HLA allele is known or predicted to likely present a HIV antigen with an epitope sequence that is expressed by the identified HIV subtype (identified at step 3420). Tables 35-45 show pairings of HLA alleles and epitope sequences, where each HLA allele in a pair is predicted to present a corresponding epitope sequence.

[0524] At step 3440, an antigen-based vaccine is selected based on the HLA alleles expressed by the subject and the identified HIV subtype. In one aspect, the antigen-based vaccine is a personalized vaccine that was previously developed 1) for subjects that express the HLA alleles and 2) for the particular identified HIV subtype. For example, the antigen-based vaccine can include 1, 2, 3, 4, 5, 6, 7, 8, 9, or 10 epitopes that are known to be expressed by the identified HIV subtype, each of the epitopes known or predicted to likely be presented by the proteins corresponding to expressed HLA alleles of the subjects. As another example, the antigen-based vaccine can include antigen-encoding nucleic acid sequences that encode for antigens that include the epitope sequences. Such epitope sequences are known or predicted to likely be presented by the proteins corresponding to expressed HLA alleles of the subjects.

[0525] At step 3450, the selected antigen-based vaccine is administered to the subject.

[0526] In some aspects, the steps in the flow process 3400 can be differently ordered than as shown in FIG. 34. For example, the HIV subtype may be identified (step 3420) prior to determining the subject's expression of one or more HLA alleles (step 3410).

[0527] VII.D. Alternate Embodiment for Selecting a Subject for Administering an Antigen-Based Vaccine

[0528] Reference is made to FIG. 35 depicts a flow process 3500 for providing an antigen-based vaccine to the subject, in accordance with a second embodiment. Given the high mutation rate of HIV, in some scenarios, particular epitope sequences of proteins derived from HIV may be mutated. Such mutations may have arisen in the HIV after the HIV infected the subject. Additionally, these mutated epitope sequences may be presented by HLA alleles of a subject. Thus, FIG. 35 depicts a flow process for providing a personalized antigen-based vaccine to a subject, where the antigen-based vaccine includes antigens with mutated epitope sequences corresponding to HIV that the subject was previously exposed to.

[0529] At step 3510, whether the subject expresses one or more HLA alleles is determined. Similar to step 3410 shown in FIG. 34, the determination of whether the subject expresses one or more HLA alleles involves performing ancestral population-based analysis or involves identifying the haplotype of the patient.

[0530] At step 3520, sequencing data of HIV that the subject was exposed to is obtained. In one aspect, a sample containing HIV can be obtained from the subject and the HIV is then sequenced. As an example, the sample can be obtained from the subject's lymph nodes and the HIV can be sequenced according to the methods described above in the section entitled “Identifying HIV epitope sequences.”

[0531] At step 3530, candidate epitope sequences are selected for inclusion in an antigen-based vaccine. To identify candidate epitope sequences, a presentation model can be applied to the sequencing data of HIV. The presentation model is described in further detail below. In some aspects, the candidate epitope sequences include mutated epitope sequences identified from the obtained sequencing data of HIV. Such mutated epitope sequences may not appear in Tables 35-45. In some aspects, the candidate epitope sequences include any of the epitope sequences shown in Tables 35-45 (e.g., any of SEQ ID Nos: 325-22349). In some aspects, the candidate epitope sequences include validated HIV epitope sequences. In some aspects, the candidate epitope sequences include any combination of mutated epitope sequences, epitope sequences shown in Tables 35-45 (any of SEQ ID Nos: 325-22349), and validated HIV epitope sequences.

[0532] At step 3540, the antigen-based vaccine is generated, the vaccine including the selected candidate epitope sequences. Thus, the antigen-based vaccine is a personalized vaccine for the subject as it includes the mutated epitope sequences that are specific for the mutated epitope sequences expressed by HIV that has infected the subject.

[0533] At step 3550, the antigen-based vaccine is administered to the subject.

### VIII. Vaccine Manufacturing

[0534] Also disclosed is a method of manufacturing an antigen-based vaccine, comprising performing the steps of a method disclosed herein; and producing an antigen-based vaccine comprising a plurality of antigens or a subset of the plurality of antigens.

[0535] Antigens disclosed herein can be manufactured using methods known in the art. For example, a method of producing an antigen or a vector (e.g., a vector including at least one sequence encoding one or more antigens) disclosed herein can include culturing a host cell under conditions suitable for expressing the antigen or vector wherein the host cell comprises at least one polynucleotide encoding the antigen or vector, and purifying the antigen or vector. Standard purification methods include chromatographic techniques, electrophoretic, immunological, precipitation, dialysis, filtration, concentration, and chromatofocusing techniques.

[0536] Host cells can include a Chinese Hamster Ovary (CHO) cell, NSO cell, yeast, or a HEK293 cell. Host cells can be transformed with one or more polynucleotides comprising at least one nucleic acid sequence that encodes an antigen or vector disclosed herein, optionally wherein the isolated polynucleotide further comprises a promoter sequence operably linked to the at least one nucleic acid sequence that encodes the antigen or vector. In certain embodiments the isolated polynucleotide can be cDNA.

### IX. Vaccination Protocol

[0537] A vaccination protocol can be used to dose a subject with one or more antigens. A priming vaccine and a boosting vaccine can be used to dose the subject. In various embodiments, the priming vaccine can be based on C68 (e.g., the sequences shown in SEQ ID NO:1 or 2) or srRNA (e.g., the sequences shown in SEQ ID NO:3 or 4) and the boosting vaccine can be based on C68 (e.g., the sequences shown in SEQ ID NO:1 or 2) or srRNA (e.g., the sequences shown in SEQ ID NO:3 or 4). In various embodiments, the priming vaccine can be based on alphavirus and the boosting vaccine can be based on alphavirus. In various embodiments, the priming vaccine can be based on C68 and the boosting vaccine can be based on alphavirus.

[0538] Each vector typically includes a cassette that includes antigens. Cassettes can include about 20 antigens, separated by spacers such as the natural sequence that normally surrounds each antigen or other non-natural spacer sequences such as AAY. Cassettes can also include MHCII antigens such a tetanus toxoid antigen and PADRE antigen, which can be considered universal class II antigens. Cassettes can also include a targeting sequence such as a ubiquitin targeting sequence. In addition, each vaccine dose can be administered to the subject in conjunction with (e.g., concurrently, before, or after) anti-retrovirals such as nucleoside reverse transcriptase inhibitors (NRTIs), nonnucleoside reverse transcriptase inhibitors (NNRTIs), protease inhibitors (PIs), fusion inhibitors, Entry inhibitors—CCr5 co-receptor antagonist, or HIV integrase strand transfer inhibitors.

[0539] A priming vaccine can be injected (e.g., intramuscularly) in a subject. Bilateral injections per dose can be used. For example, one or more injections of ChAdV68 (C68) can be used (e.g., total dose 1×10¹² viral particles); one or more injections of self-replicating RNA (srRNA) at low vaccine dose selected from the range 0.001 to 1 ug RNA, in particular 0.1 or 1 ug can be used; or one or more injections of srRNA at high vaccine dose selected from the range 1 to 100 ug RNA, in particular 10 or 100 ug can be used.

[0540] A vaccine boost (boosting vaccine) can be injected (e.g., intramuscularly) after prime vaccination. A boosting vaccine can be administered about every 1, 2, 3, 4, 5, 6, 7, 8, 9, or 10 weeks, e.g., every 4 weeks and/or 8 weeks after the prime. Bilateral injections per dose can be used. For example, one or more injections of ChAdV68 (C68) can be used (e.g., total dose 1×10¹² viral particles); one or more injections of self-replicating RNA (srRNA) at low vaccine dose selected from the range 0.001 to 1 ug RNA, in particular 0.1 or 1 ug can be used; or one or more injections of srRNA at high vaccine dose selected from the range 1 to 100 ug RNA, in particular 10 or 100 ug can be used.

[0541] Immune monitoring can be performed before, during, and/or after vaccine administration. Such monitoring can inform safety and efficacy, among other parameters.

[0542] To perform immune monitoring, PBMCs are commonly used. PBMCs can be isolated before prime vaccination, and after prime vaccination (e.g. 4 weeks and 8 weeks). PBMCs can be harvested just prior to boost vaccinations and after each boost vaccination (e.g. 4 weeks and 8 weeks).

[0543] T cell responses can be assessed as part of an immune monitoring protocol. T cell responses can be measured using one or more methods known in the art such as ELISpot, intracellular cytokine staining, cytokine secretion and cell surface capture, T cell proliferation, MHC multimer staining, or by cytotoxicity assay. T cell responses to epitopes encoded in vaccines can be monitored from PBMCs by measuring induction of cytokines, such as IFN-gamma, using an ELISpot assay. Specific CD4 or CD8 T cell responses to epitopes encoded in vaccines can be monitored from PBMCs by measuring induction of cytokines captured intracellularly or extracellularly, such as IFN-gamma, using flow cytometry. Specific CD4 or CD8 T cell responses to epitopes encoded in the vaccines can be monitored from PBMCs by measuring T cell populations expressing T cell receptors specific for epitope/MHC class I complexes using MHC multimer staining. Specific CD4 or CD8 T cell responses to epitopes encoded in the vaccines can be monitored from PBMCs by measuring the ex vivo expansion of T cell populations following 3H-thymidine, bromodeoxyuridine and carboxyfluoresceine-diacetate-succinimidylester (CFSE) incorporation. The antigen recognition capacity and lytic activity of PBMC-derived T cells that are specific for epitopes encoded in vaccines can be assessed functionally by chromium release assay or alternative colorimetric cytotoxicity assays.

### X. Identifying Candidate Antigens

[0544] Candidate antigens can be identified using computational prediction models that predict how likely different antigens are to be presented by HLA alleles. The training and deployment of such computational prediction models, also referred to as presentation models or machine learning models, is discussed in the following sections.

[0545] X.A. Presentation Model

[0546] Presentation models, also referred to as machine learning models, can be used to identify likelihoods of peptide presentation in patients. Various presentation models are known to those skilled in the art, for example the presentation models described in more detail in international patent application publications WO/2017/106638, WO/2018/195357, WO/2018/208856, WO2016187508, US patent application US20110293637, and PCT/US19/33830, each herein incorporated by reference, in their entirety, for all purposes.

[0547] X.B. Training Module

[0548] Training modules can be used to construct one or more presentation models based on training data sets that generate likelihoods of whether peptide sequences will be presented by MHC alleles associated with the peptide sequences. Various training modules are known to those skilled in the art, for example the presentation models described in more detail in international patent application publications WO/2017/106638, WO/2018/195357, WO/2018/208856, and PCT/US19/33830, each herein incorporated by reference, in their entirety, for all purposes. A training module can construct a presentation model to predict presentation likelihoods of peptides on a per-allele basis. A training module can also construct a presentation model to predict presentation likelihoods of antigens in a multiple-allele setting where two or more MHC alleles are present.

[0549] X.C. Prediction Module

[0550] A prediction module can be used to receive sequence data and select candidate epitope sequences in the sequence data using a presentation model. Specifically, the sequence data may be DNA sequences, RNA sequences, and/or protein sequences corresponding to the HIV genome. For example, sequence data may be a HIV epitope sequence (e.g., 8-11 amino acid residues in length) encoded by a gene in the HIV genome.

[0551] Generally, a presentation module can apply one or more presentation models to estimate presentation likelihoods of each peptide sequence. The prediction module selects one or more candidate epitope sequences that are likely to be presented on HLA molecules based on the estimated presentation likelihoods. In one embodiment, the presentation module applies presentation models to epitope sequences to estimate presentation likelihoods. In some embodiments, the presentation module applies presentation models to encoded representations of epitope sequences to estimate presentation likelihoods. Such encoded representations may be feature vectors of the peptide sequences. The presentation model outputs estimated presentation likelihoods of antigen presentation in patients.

[0552] In one implementation, the presentation module selects candidate epitope sequences that have estimated presentation likelihoods above a predetermined threshold. In another implementation, the presentation model selects the N candidate epitope sequences that have the highest estimated presentation likelihoods (where N is generally the maximum number of epitopes that can be delivered in a vaccine).

[0553] In some aspects, the presentation module may further prioritize the candidate epitope sequences by analyzing the structure of antigens that include the candidate epitope sequences. For example, the presentation module may analyze the structure of HIV antigens that include the candidate epitope sequences in order to identify particular amino acid residues or mutations of particular amino acid residues that are highly influential in HIV activity (e.g., viral replication/infection and ability to escape the immune system). Epitope sequences with these identified particular amino acid residues can be ranked more highly. Example analysis, also referred to as structure-based network analysis, is described in further detail in “Structural topology defines protective CD8+ T cell epitopes in the HIV proteome,” which is hereby incorporated by reference in its entirety.¹⁰⁶

### XI. Cassette Design Module

[0554] A cassette design module can generate a vaccine cassette sequence based on selected candidate peptides. For example, the cassette design module can select, for inclusion in the vaccine cassette sequence, antigen-encoding nucleic acid sequences that encode for the selected candidate peptides. Various cassette design modules are known to those skilled in the art, for example the cassette design modules described in more detail in international patent application publications WO/2017/106638, WO/2018/195357, and WO/2018/208856, each herein incorporated by reference, in their entirety, for all purposes.

[0555] A set of therapeutic epitopes may be generated based on the selected peptides determined by a prediction module associated with presentation likelihoods above a predetermined threshold, where the presentation likelihoods are determined by the presentation models. However it is appreciated that in other embodiments, the set of therapeutic epitopes may be generated based on any one or more of a number of methods (alone or in combination), for example, based on binding affinity or predicted binding affinity to HLA class I or class II alleles of the patient, binding stability or predicted binding stability to HLA class I or class II alleles of the patient, random sampling, and the like.

[0556] Therapeutic epitopes may correspond to selected peptides themselves. Therapeutic epitopes may also include C- and/or N-terminal flanking sequences in addition to the selected peptides. N- and C-terminal flanking sequences can be the native N- and C-terminal flanking sequences of the therapeutic vaccine epitope in the context of its source protein. Therapeutic epitopes can represent a fixed-length epitope. Therapeutic epitopes can represent a variable-length epitope, in which the length of the epitope can be varied depending on, for example, the length of the C- or N-flanking sequence. For example, the C-terminal flanking sequence and the N-terminal flanking sequence can each have varying lengths of 2-5 residues, resulting in 16 possible choices for the epitope.

[0557] A cassette design module can also generate cassette sequences by taking into account presentation of junction epitopes that span the junction between a pair of therapeutic epitopes in the cassette. Junction epitopes are novel non-self but irrelevant epitope sequences that arise in the cassette due to the process of concatenating therapeutic epitopes and linker sequences in the cassette. The novel sequences of junction epitopes are different from the therapeutic epitopes of the cassette themselves.

[0558] A cassette design module can generate a cassette sequence that reduces the likelihood that junction epitopes are presented in the patient. Specifically, when the cassette is injected into the patient, junction epitopes have the potential to be presented by HLA class I or HLA class II alleles of the patient, and stimulate a CD8 or CD4 T-cell response, respectively. Such reactions are often times undesirable because T-cells reactive to the junction epitopes have no therapeutic benefit, and may diminish the immune response to the selected therapeutic epitopes in the cassette by antigenic competition.⁷⁶

[0559] A cassette design module can iterate through one or more candidate cassettes, and determine a cassette sequence for which a presentation score of junction epitopes associated with that cassette sequence is below a numerical threshold. The junction epitope presentation score is a quantity associated with presentation likelihoods of the junction epitopes in the cassette, and a higher value of the junction epitope presentation score indicates a higher likelihood that junction epitopes of the cassette will be presented by HLA class I proteins or HLA class II proteins or both.

[0560] In one embodiment, a cassette design module may determine a cassette sequence associated with the lowest junction epitope presentation score among the candidate cassette sequences.

[0561] A cassette design module may iterate through one or more candidate cassette sequences, determine the junction epitope presentation score for the candidate cassettes, and identify an optimal cassette sequence associated with a junction epitope presentation score below the threshold.

[0562] A cassette design module may further check the one or more candidate cassette sequences to identify if any of the junction epitopes in the candidate cassette sequences are self-epitopes for a given patient for whom the vaccine is being designed. To accomplish this, the cassette design module checks the junction epitopes against a known database such as BLAST. In one embodiment, the cassette design module may be configured to design cassettes that avoid junction self-epitopes.

[0563] A cassette design module can perform a brute force approach and iterate through all or most possible candidate cassette sequences to select the sequence with the smallest junction epitope presentation score. However, the number of such candidate cassettes can be prohibitively large as the capacity of the vaccine increases. For example, for a vaccine capacity of 20 epitopes, the cassette design module has to iterate through ˜10¹⁸ possible candidate cassettes to determine the cassette with the lowest junction epitope presentation score. This determination may be computationally burdensome (in terms of computational processing resources required), and sometimes intractable, for the cassette design module to complete within a reasonable amount of time to generate the vaccine for the patient. Moreover, accounting for the possible junction epitopes for each candidate cassette can be even more burdensome. Thus, a cassette design module may select a cassette sequence based on ways of iterating through a number of candidate cassette sequences that are significantly smaller than the number of candidate cassette sequences for the brute force approach.

[0564] A cassette design module can generate a subset of randomly or at least pseudo-randomly generated candidate cassettes, and selects the candidate cassette associated with a junction epitope presentation score below a predetermined threshold as the cassette sequence. Additionally, the cassette design module may select the candidate cassette from the subset with the lowest junction epitope presentation score as the cassette sequence. For example, the cassette design module may generate a subset of ˜1 million candidate cassettes for a set of 20 selected epitopes, and select the candidate cassette with the smallest junction epitope presentation score. Although generating a subset of random cassette sequences and selecting a cassette sequence with a low junction epitope presentation score out of the subset may be sub-optimal relative to the brute force approach, it requires significantly less computational resources thereby making its implementation technically feasible. Further, performing the brute force method as opposed to this more efficient technique may only result in a minor or even negligible improvement in junction epitope presentation score, thus making it not worthwhile from a resource allocation perspective. A cassette design module can determine an improved cassette configuration by formulating the epitope sequence for the cassette as an asymmetric traveling salesman problem (TSP). Given a list of nodes and distances between each pair of nodes, the TSP determines a sequence of nodes associated with the shortest total distance to visit each node exactly once and return to the original node. For example, given cities A, B, and C with known distances between each other, the solution of the TSP generates a closed sequence of cities, for which the total distance traveled to visit each city exactly once is the smallest among possible routes. The asymmetric version of the TSP determines the optimal sequence of nodes when the distance between a pair of nodes are asymmetric. For example, the “distance” for traveling from node A to node B may be different from the “distance” for traveling from node B to node A. By solving for an improved optimal cassette using an asymmetric TSP, the cassette design module can find a cassette sequence that results in a reduced presentation score across the junctions between epitopes of the cassette. The solution of the asymmetric TSP indicates a sequence of therapeutic epitopes that correspond to the order in which the epitopes should be concatenated in a cassette to minimize the junction epitope presentation score across the junctions of the cassette. A cassette sequence determined through this approach can result in a sequence with significantly less presentation of junction epitopes while potentially requiring significantly less computational resources than the random sampling approach, especially when the number of generated candidate cassette sequences is large. Illustrative examples of different computational approaches and comparisons for optimizing cassette design are described in more detail in international patent application publications WO/2017/106638, WO/2018/195357, and WO/2018/208856, each herein incorporated by reference, in their entirety, for all purposes.

### XII. Example Computer

[0565] A computer can be used for any of the computational methods described herein. One skilled in the art will recognize a computer can have different architectures. Examples of computers are known to those skilled in the art, for example the computers described in more detail in international patent application publications WO/2017/106638, WO/2018/195357, and WO/2018/208856, each herein incorporated by reference, in their entirety, for all purposes.

### EXAMPLES

### XIII. Example 1: Antigen Delivery Vector Example

[0566] Below are examples of specific embodiments for carrying out the present invention. The examples are offered for illustrative purposes only, and are not intended to limit the scope of the present invention in any way. Efforts have been made to ensure accuracy with respect to numbers used (e.g., amounts, temperatures, etc.), but some experimental error and deviation should be allowed for.

[0567] The practice of the present invention will employ, unless otherwise indicated, conventional methods of protein chemistry, biochemistry, recombinant DNA techniques and pharmacology, within the skill of the art. Such techniques are explained fully in the literature. See, e.g., T. E. Creighton, Proteins: Structures and Molecular Properties (W. H. Freeman and Company, 1993); A. L. Lehninger, Biochemistry (Worth Publishers, Inc., current addition); Sambrook, et al., Molecular Cloning: A Laboratory Manual (2nd Edition, 1989); Methods In Enzymology (S. Colowick and N. Kaplan eds., Academic Press, Inc.); Remington's Pharmaceutical Sciences, 18th Edition (Easton, Pa.: Mack Publishing Company, 1990); Carey and Sundberg Advanced Organic Chemistry 3^{rd} Ed. (Plenum Press) Vols A and B (1992).

[0568] XIII.A. Antigen Cassette Design

[0569] Through vaccination, multiple class I MHC restricted HIV-specific antigens that induce an immune response can be delivered. In one example, a vaccine cassette was engineered to encode multiple epitope sequences as a single gene product where the epitopes were either embedded within their natural, surrounding peptide sequence or spaced by non-natural linker sequences. Several design parameters were identified that could potentially impact antigen processing and presentation and therefore the magnitude and breadth of the TSNA specific CD8 T cell responses. In the present example, several model cassettes were designed and constructed to evaluate: (1) whether robust T cell responses could be generated to multiple epitopes incorporated in a single expression cassette; (2) what makes an optimal linker placed between the TSNAs within the expression cassette—that leads to optimal processing and presentation of all epitopes; (3) if the relative position of the epitopes within the cassette impact T cell responses; (4) whether the number of epitopes within a cassette influences the magnitude or quality of the T cell responses to individual epitopes; (5) if the addition of cellular targeting sequences improves T cell responses.

[0570] Two readouts were developed to evaluate antigen presentation and T cell responses specific for marker epitopes within the model cassettes: (1) an in vitro cell-based screen which allowed assessment of antigen presentation as gauged by the activation of specially engineered reporter T cells (Aarnoudse et al., 2002; Nagai et al., 2012); and (2) an in vivo assay that used HLA-A2 transgenic mice (Vitiello et al., 1991) to assess post-vaccination immunogenicity of cassette-derived epitopes of human origin by their corresponding epitope-specific T cell responses (Cornet et al., 2006; Depla et al., 2008; Ishioka et al., 1999).

[0571] XIII.B. Antigen Cassette Design Evaluation

[0572] XIII.B.1. Methods and Materials

### TCR and Cassette Design and Cloning

[0573] The selected TCRs recognize peptides NLVPMVATV (SEQ ID NO: 95) (PDB#5D2N), CLGGLLTMV (SEQ ID NO: 96) (PDB#3REV), GILGFVFTL (SEQ ID NO: 97) (PDB#1OGA) LLFGYPVYV (SEQ ID NO: 98) (PDB#1AO7) when presented by proteins of A*0201 allele. Transfer vectors were constructed that contain 2A peptide-linked TCR subunits (beta followed by alpha), the EMCV IRES, and 2A-linked CD8 subunits (beta followed by alpha and by the puromycin resistance gene). Open reading frame sequences were codon-optimized and synthesized by GeneArt.

### Cell Line Generation for In Vitro Epitope Processing and Presentation Studies

[0574] Peptides were purchased from ProImmune or Genscript diluted to 10 mg/mL with 10 mM tris(2-carboxyethyl)phosphine (TCEP) in water/DMSO (2:8, v/v). Cell culture medium and supplements, unless otherwise noted, were from Gibco. Heat inactivated fetal bovine serum (FBShi) was from Seradigm. QUANTI-Luc Substrate, Zeocin, and Puromycin were from InvivoGen. Jurkat-Lucia NFAT Cells (InvivoGen) were maintained in RPMI 1640 supplemented with 10% FBShi, Sodium Pyruvate, and 100 μg/mL Zeocin. Once transduced, these cells additionally received 0.3 μg/mL Puromycin. T2 cells (ATCC CRL-1992) were cultured in Iscove's Medium (IMDM) plus 20% FBShi. U-87 MG (ATCC HTB-14) cells were maintained in MEM Eagles Medium supplemented with 10% FBShi.

[0575] Jurkat-Lucia NFAT cells contain an NFAT-inducible Lucia reporter construct. The Lucia gene, when activated by the engagement of the T cell receptor (TCR), causes secretion of a coelenterazine-utilizing luciferase into the culture medium. This luciferase can be measured using the QUANTI-Luc luciferase detection reagent. Jurkat-Lucia cells were transduced with lentivirus to express antigen-specific TCRs. The HIV-derived lentivirus transfer vector was obtained from GeneCopoeia, and lentivirus support plasmids expressing VSV-G (pCMV-VsvG), Rev (pRSV-Rev) and Gag-pol (pCgpV) were obtained from Cell Design Labs.

[0576] Lentivirus was prepared by transfection of 50-80% confluent T75 flasks of HEK293 cells with Lipofectamine 2000 (Thermo Fisher), using 40 μl of lipofectamine and 20 μg of the DNA mixture (4:2:1:1 by weight of the transfer plasmid:pCgpV:pRSV-Rev:pCMV-VsvG). 8-10 mL of the virus-containing media were concentrated using the Lenti-X system (Clontech), and the virus resuspended in 100-200 μl of fresh medium. This volume was used to overlay an equal volume of Jurkat-Lucia cells (5×10E4-1×10E6 cells were used in different experiments). Following culture in 0.3 μg/ml puromycin-containing medium, cells were sorted to obtain clonality. These Jurkat-Lucia TCR clones were tested for activity and selectivity using peptide loaded T2 cells.

### In Vitro Epitope Processing and Presentation Assay

[0577] T2 cells are routinely used to examine antigen recognition by TCRs. T2 cells lack a peptide transporter for antigen processing (TAP deficient) and cannot load endogenous peptides in the endoplasmic reticulum for presentation on the MHC. However, the T2 cells can easily be loaded with exogenous peptides. The five marker peptides (NLVPMVATV (SEQ ID NO: 99), CLGGLLTMV (SEQ ID NO: 100), GLCTLVAML (SEQ ID NO: 101), LLFGYPVYV (SEQ ID NO: 102), GILGFVFTL (SEQ ID NO: 103)) and two irrelevant peptides (WLSLLVPFV (SEQ ID NO: 104), FLLTRICT (SEQ ID NO: 105)) were loaded onto T2 cells. Briefly, T2 cells were counted and diluted to 1×106 cells/mL with IMDM plus 1% FBShi. Peptides were added to result in 10 μg peptide/1×106 cells. Cells were then incubated at 37° C. for 90 minutes. Cells were washed twice with IMDM plus 20% FBShi, diluted to 5×10E5 cells/mL and 100 μL plated into a 96-well Costar tissue culture plate. Jurkat-Lucia TCR clones were counted and diluted to 5×10E5 cells/mL in RPMI 1640 plus 10% FBShi and 100 μL added to the T2 cells. Plates were incubated overnight at 37° C., 5% CO2. Plates were then centrifuged at 400 g for 3 minutes and 20 μL supernatant removed to a white flat bottom Greiner plate. QUANTI-Luc substrate was prepared according to instructions and 50 μL/well added. Luciferase expression was read on a Molecular Devices SpectraMax iE3x.

[0578] To test marker epitope presentation by the adenoviral cassettes, U-87 MG cells were used as surrogate antigen presenting cells (APCs) and were transduced with the adenoviral vectors. U-87 MG cells were harvested and plated in culture media as 5×10E5 cells/100 μl in a 96-well Costar tissue culture plate. Plates were incubated for approximately 2 hours at 37° C. Adenoviral cassettes were diluted with MEM plus 10% FBShi to an MOI of 100, 50, 10, 5, 1 and 0 and added to the U-87 MG cells as 5 μl/well. Plates were again incubated for approximately 2 hours at 37° C. Jurkat-Lucia TCR clones were counted and diluted to 5×10E5 cells/mL in RPMI plus 10% FBShi and added to the U-87 MG cells as 100 μL/well. Plates were then incubated for approximately 24 hours at 37° C., 5% CO2. Plates were centrifuged at 400 g for 3 minutes and 20 μL supernatant removed to a white flat bottom Greiner plate. QUANTI-Luc substrate was prepared according to instructions and 50 μL/well added. Luciferase expression was read on a Molecular Devices SpectraMax iE3x.

### Mouse Strains for Immunogenicity Studies

[0579] Transgenic HLA-A2.1 (HLA-A2 Tg) mice were obtained from Taconic Labs, Inc. These mice carry a transgene consisting of a chimeric class I molecule comprised of the human HLA-A2.1 leader, α1, and α2 domains and the murine H2-Kb α3, transmembrane, and cytoplasmic domains (Vitiello et al., 1991). Mice used for these studies were the first generation offspring (F1) of wild type BALB/cAnNTac females and homozygous HLA-A2.1 Tg males on the C57Bl/6 background.

### Adenovirus Vector (Ad5v) Immunizations

[0580] HLA-A2 Tg mice were immunized with 1×10¹⁰ to 1×10⁶ viral particles of adenoviral vectors via bilateral intramuscular injection into the tibialis anterior. Immune responses were measured at 12 days post-immunization.

### Lymphocyte Isolation

[0581] Lymphocytes were isolated from freshly harvested spleens and lymph nodes of immunized mice. Tissues were dissociated in RPMI containing 10% fetal bovine serum with penicillin and streptomycin (complete RPMI) using the GentleMACS tissue dissociator according to the manufacturer's instructions.

### Ex Vivo Enzyme-Linked Immunospot (ELISPOT) Analysis

[0582] ELISPOT analysis was performed according to ELISPOT harmonization guidelines (Janetzki et al., 2015) with the mouse IFNg ELISpotPLUS kit (MABTECH). 1×10⁵ splenocytes were incubated with 10 uM of the indicated peptides for 16 hours in 96-well IFNg antibody coated plates. Spots were developed using alkaline phosphatase. The reaction was timed for 10 minutes and was quenched by running the plate under tap water. Spots were counted using an AID vSpot Reader Spectrum. For ELISPOT analysis, wells with saturation >50% were recorded as “too numerous to count”. Samples with deviation of replicate wells >10% were excluded from analysis. Spot counts were then corrected for well confluency using the formula: spot count+2x(spot count x % confluence/[100%−% confluence]). Negative background was corrected by subtraction of spot counts in the negative peptide stimulation wells from the antigen stimulated wells. Finally, wells labeled too numerous to count were set to the highest observed corrected value, rounded up to the nearest hundred.

### Ex Vivo Intracellular Cytokine Staining (ICS) and Flow Cytometry Analysis

[0583] Freshly isolated lymphocytes at a density of 2-5×10⁶ cells/mL were incubated with 10 uM of the indicated peptides for 2 hours. After two hours, brefeldin A was added to a concentration of 5 ug/ml and cells were incubated with stimulant for an additional 4 hours. Following stimulation, viable cells were labeled with fixable viability dye eFluor780 according to manufacturer's protocol and stained with anti-CD8 APC (clone 53-6.7, BioLegend) at 1:400 dilution. Anti-IFNg PE (clone XMG1.2, BioLegend) was used at 1:100 for intracellular staining. Samples were collected on an Attune NxT Flow Cytometer (Thermo Scientific). Flow cytometry data was plotted and analyzed using FlowJo. To assess degree of antigen-specific response, both the percent IFNg+ of CD8+ cells and the total IFNg+ cell number/1×10⁶ live cells were calculated in response to each peptide stimulant.

[0584] XIII.B.2. In Vitro Evaluation of Antigen Cassette Designs

[0585] As an example of antigen cassette design evaluation, an in vitro cell-based assay was developed to assess whether selected human epitopes within model vaccine cassettes were being expressed, processed, and presented by antigen-presenting cells (FIG. 1). Upon recognition, Jurkat-Lucia reporter T cells that were engineered to express one of five TCRs specific for well-characterized peptide-HLA combinations become activated and translocate the nuclear factor of activated T cells (NFAT) into the nucleus which leads to transcriptional activation of a luciferase reporter gene. Antigenic stimulation of the individual reporter CD8 T cell lines was quantified by bioluminescence.

[0586] Individual Jurkat-Lucia reporter lines were modified by lentiviral transduction with an expression construct that includes an antigen-specific TCR beta and TCR alpha chain separated by a P2A ribosomal skip sequence to ensure equimolar amounts of translated product (Banu et al., 2014). The addition of a second CD8 beta-P2A-CD8 alpha element to the lentiviral construct provided expression of the CD8 co-receptor, which the parent reporter cell line lacks, as CD8 on the cell surface is crucial for the binding affinity to target pMHC molecules and enhances signaling through engagement of its cytoplasmic tail (Lyons et al., 2006; Yachi et al., 2006).

[0587] After lentiviral transduction, the Jurkat-Lucia reporters were expanded under puromycin selection, subjected to single cell fluorescence assisted cell sorting (FACS), and the monoclonal populations tested for luciferase expression. This yielded stably transduced reporter cell lines for specific peptide antigens 1, 2, 4, and 5 with functional cell responses. (Table 3A).

TABLE 3A
Development of an in vitro T cell activation assay.
Peptide-specific T cell recognition as measured by
induction of luciferase indicates effective processing
and presentation of the vaccine cassette antigens.

| | Short Cassette Design |
|---|---|
| Epitope | AAY |
| 1 | 24.5 ± 0.5 |
| 2 | 11.3 ± 0.4 |
| 3* | n/a |
| 4 | 26.1 ± 3.1 |
| 5 | 46.3 ± 1.9 |

*Reporter T cell for epitope 3 not yet generated

[0588] In another example, a series of short cassettes, all marker epitopes were incorporated in the same position (FIG. 2A) and only the linkers separating the HLA-A*0201 restricted epitopes (FIG. 2B) were varied. Reporter T cells were individually mixed with U-87 antigen-presenting cells (APCs) that were infected with adenoviral constructs expressing these short cassettes, and luciferase expression was measured relative to uninfected controls. All four antigens in the model cassettes were recognized by matching reporter T cells, demonstrating efficient processing and presentation of multiple antigens. The magnitude of T cell responses follow largely similar trends for the natural and AAY-linkers. The antigens released from the RR-linker based cassette show lower luciferase inductions (Table 3B). The DPP-linker, designed to disrupt antigen processing, produced a vaccine cassette that led to low epitope presentation (Table 3B).

TABLE 3B
Evaluation of linker sequences in short cassettes. Luciferase induction in the in
vitro T cell activation assay indicated that, apart from the DPP-based cassette, all linkers
facilitated efficient release of the cassette antigens. T cell epitope only (no linker) = 9AA,
natural linker one side = 17AA, natural linker both sides = 25AA, non-natural linkers =
AAY, RR, DPP

| | Short Cassette Designs | | | | | |
|---|---|---|---|---|---|---|
| Epitope | 9AA | 17AA | 25AA | AAY | RR | DPP |
| 1 | 33.6 ± 0.9 | 42.8 ± 2.1 | 42.3 ± 2.3 | 24.5 ± 0.5 | 21.7 ± 0.9 | 0.9 ± 0.1 |
| 2 | 12.0 ± 0.9 | 10.3 ± 0.6 | 14.6 ± 04 | 11.3 ± 0.4 | 8.5 ± 0.3 | 1.1 ± 0.2 |
| 3* | n/a | n/a | n/a | n/a | n/a | n/a |
| 4 | 26.6 ± 2.5 | 16.1 ± 0.6 | 16.6 ± 0.8 | 26.1 ± 3.1 | 12.5 ± 0.8 | 1.3 ± 0.2 |
| 5 | 29.7 ± 0.6 | 21.2 ± 0.7 | 24.3 ± 1.4 | 46.3 ± 1.9 | 19.7 ± 0.4 | 1.3 ± 0.1 |

*Reporter T cell for epitope 3 not yet generated

[0589] In another example, an additional series of short cassettes were constructed that, besides human and mouse epitopes, contained targeting sequences such as ubiquitin (Ub), MHC and Ig-kappa signal peptides (SP), and/or MHC transmembrane (TM) motifs positioned on either the N- or C-terminus of the cassette. (FIG. 3). When delivered to U-87 APCs by adenoviral vector, the reporter T cells again demonstrated efficient processing and presentation of multiple cassette-derived antigens. However, the magnitude of T cell responses were not substantially impacted by the various targeting features (Table 4).

TABLE 4
Evaluation of cellular targeting sequences added to model vaccine cassettes.
Employing the in vitro T cell activation assay demonstrated that the four HLA-A*0201
restricted marker epitopes are liberated efficiently from the model cassettes and targeting
sequences did not substantially improve T cell recognition and activation.

| | Short Cassette Designs | | | | | | | | | |
|---|---|---|---|---|---|---|---|---|---|---|
| Epitope | A | B | C | D | E | F | G | H | I | J |
| 1 | 32.5 ± | 31.8 ± | 29.1 ± | 29.1 ± | 28.4 ± | 20.4 ± | 35.0 ± | 30.3 ± | 22.5 ± | 38.1 ± |
| | 1.5 | 0.8 | 1.2 | 1.1 | 0.7 | 0.5 | 1.3 | 2.0 | 0.9 | 1.6 |
| 2 | 6.1 ± | 6.3 ± | 7.6 ± | 7.0 ± | 5.9 ± | 3.7 ± | 7.6 ± | 5.4 ± | 6.2 ± | 6.4 ± |
| | 0.2 | 0.2 | 0.4 | 0.5 | 0.2 | 0.2 | 0.4 | 0.3 | 0.4 | 0.3 |
| 3* | n/a | n/a | n/a | n/a | n/a | n/a | n/a | n/a | n/a | n/a |
| 4 | 12.3 ± | 14.1 ± | 12.2 ± | 13.7 ± | 11.7 ± | 10.6 ± | 11.0 ± | 7.6 ± | 16.1 ± | 8.7 ± |
| | 1.1 | 0.7 | 0.8 | 1.0 | 0.8 | 0.4 | 0.6 | 0.6 | 0.5 | 0.5 |
| 5 | 44.4 ± | 53.6 ± | 49.9 ± | 50.5 ± | 41.7 ± | 36.1 ± | 46.5 ± | 31.4 ± | 75.4 ± | 35.7 ± |
| | 2.8 | 1.6 | 3.3 | 2.8 | 2.8 | 1.1 | 2.1 | 0.6 | 1.6 | 2.2 |

*Reporter T cell for epitope 3 not yet generated

[0590] XIII.B.3. In Vivo Evaluation of Antigen Cassette Designs

[0591] As another example of antigen cassette design evaluation, vaccine cassettes were designed to contain 5 well-characterized human class I MHC epitopes known to stimulate CD8 T cells in an HLA-A*02:01 restricted fashion (FIG. 2A, 3, 5A). For the evaluation of their in vivo immunogenicity, vaccine cassettes containing these marker epitopes were incorporated in adenoviral vectors and used to infect HLA-A2 transgenic mice. This mouse model carries a transgene consisting partly of human HLA-A*0201 and mouse H2-Kb thus encoding a chimeric class I MHC molecule consisting of the human HLA-A2.1 leader, α1 and α2 domains ligated to the murine α3, transmembrane and cytoplasmic H2-Kb domain (Vitiello et al., 1991). The chimeric molecule allows HLA-A*02:01-restricted antigen presentation whilst maintaining the species-matched interaction of the CD8 co-receptor with the α3 domain on the MHC.

[0592] For the short cassettes, all marker epitopes generated a T cell response, as determined by IFN-gamma ELISPOT, that was approximately 10-50× stronger of what has been commonly reported (Cornet et al., 2006; Depla et al., 2008; Ishioka et al., 1999). Of all the linkers evaluated, the concatamer of 25mer sequences, each containing a minimal epitope flanked by their natural amino acids sequences, generated the largest and broadest T cell response (Table 5). Intracellular cytokine staining (ICS) and flow cytometry analysis revealed that the antigen-specific T cell responses are derived from CD8 T cells.

TABLE 5
In vivo evaluation of linker sequences in short cassettes. ELISPOT data indicated
that HLA-A2 transgenic mice, 17 days post-infection with 1e11 adenovirus viral particles,
generated a T cell response to all class I MHC restricted epitopes in the cassette.

| | Short Cassette Designs | | | | | |
|---|---|---|---|---|---|---|
| Epitope | 9AA | 17AA | 25AA | AAY | RR | DPP |
| 1 | 2020 +/− 583 | 2505 +/− 1281 | 6844 +/− 956 | 1489 +/− 762 | 1675 +/− 690 | 1781 +/− 774 |
| 2 | 4472 +/− 755 | 3792 +/− 1319 | 7629 +/− 996 | 3851 +/− 1748 | 4726 +/− 1715 | 5868 +/− 1427 |
| 3 | 5830 +/− 315 | 3629 +/− 862 | 7253 +/− 491 | 4813 +/− 1761 | 6779 +/− 1033 | 7328 +/− 1700 |
| 4 | 5536 +/− 375 | 2446 +/− 955 | 2961 +/− 1487 | 4230 +/− 1759 | 6518 +/− 909 | 7222 +/− 1824 |
| 5 | 8800 +/− 0 | 7943 +/− 821 | 8423 +/− 442 | 8312 +/− 696 | 8800 +/− 0 | 1836 +/− 328 |

[0593] In another example, a series of long vaccine cassettes was constructed and incorporated in adenoviral vectors that, next to the original 5 marker epitopes, contained an additional 16 HLA-A*02:01, A*03:01 and B*44:05 epitopes with known CD8 T cell reactivity (FIG. 4A, B). The size of these long cassettes closely mimicked the final clinical cassette design, and only the position of the epitopes relative to each other was varied. The CD8 T cell responses were comparable in magnitude and breadth for both long and short vaccine cassettes, demonstrating that (a) the addition of more epitopes did not substantially impact the magnitude of immune response to the original set of epitopes, and (b) the position of an epitope in a cassette did not substantially influence the ensuing T cell response to it (Table 6).

TABLE 6
In vivo evaluation of the impact of epitope position in long
cassettes. ELISPOT data indicated that HLA-A2 transgenic
mice, 17 days post-infection with 5e10 adenovirus viral
particles, generated a T cell response comparable in
magnitude for both long and short vaccine cassettes.

| | Long Cassette Designs | | |
|---|---|---|---|
| Epitope | Standard | Scrambled | Short |
| 1 | 863 +/− 1080 | 804 +/− 1113 | 1871 +/− 2859 |
| 2 | 6425 +/− 1594 | 28 +/− 62 | 5390 +/− 1357 |
| 3* | 23 +/− 30 | 36 +/− 18 | 0 +/− 48 |
| 4 | 2224 +/− 1074 | 2727 +/− 644 | 2637 +/− 1673 |
| 5 | 7952 +/− 297 | 8100 +/− 0 | 8100 +/− 0 |

*Suspected technical error caused an absence of a T cell response.

[0594] XIII.B.4. Antigen Cassette Design for Immunogenicity and Toxicology Studies

[0595] In summary, the findings of the model cassette evaluations (FIG. 2-5, Tables 2-6) demonstrated that, for model vaccine cassettes, robust immunogenicity was achieved when a “string of beads” approach was employed that encodes around 20 epitopes in the context of an adenovirus-based vector. The epitopes were assembled by concatenating 25mer sequences, each embedding a minimal CD8 T cell epitope (e.g. 9 amino acid residues) that were flanked on both sides by its natural, surrounding peptide sequence (e.g. 8 amino acid residues on each side). As used herein, a “natural” or “native” flanking sequence refers to the N- and/or C-terminal flanking sequence of a given epitope in the naturally occurring context of that epitope within its source protein. For example, the HCMV pp65 MHC I epitope NLVPMVATV (SEQ ID NO: 106) is flanked on its 5′ end by the native 5′ sequence WQAGILAR (SEQ ID NO: 107) and on its 3′ end by the native 3′ sequence QGQNLKYQ (SEQ ID NO: 108), thus generating the WQAGILARNLVPMVATVQGQNLKYQ (SEQ ID NO: 109) 25mer peptide found within the HCMV pp65 source protein. The natural or native sequence can also refer to a nucleotide sequence that encodes an epitope flanked by native flanking sequence(s). Each 25mer sequence is directly connected to the following 25mer sequence. In instances where the minimal CD8 T cell epitope is greater than or less than 9 amino acids, the flanking peptide length can be adjusted such that the total length is still a 25mer peptide sequence. For example, a 10 amino acid CD8 T cell epitope can be flanked by an 8 amino acid sequence and a 7 amino acid. The concatamer was followed by two universal class II MHC epitopes that were included to stimulate CD4 T helper cells and improve overall in vivo immunogenicity of the vaccine cassette antigens. (Alexander et al., 1994; Panina-Bordignon et al., 1989) The class II epitopes were linked to the final class I epitope by a GPGPG amino acid linker (SEQ ID NO:56). The two class II epitopes were also linked to each other by a GPGPG (SEQ ID NO: 110) amino acid linker, as a well as flanked on the C-terminus by a GPGPG (SEQ ID NO: 111) amino acid linker. Neither the position nor the number of epitopes appeared to substantially impact T cell recognition or response. Targeting sequences also did not appear to substantially impact the immunogenicity of cassette-derived antigens.

[0596] As a further example, based on the in vitro and in vivo data obtained with model cassettes (FIG. 2-5, Tables 2-6), a cassette design was generated that alternates well-characterized T cell epitopes known to be immunogenic in nonhuman primates (NHPs), mice and humans. The 20 epitopes, all embedded in their natural 25mer sequences, are followed by the two universal class II MHC epitopes that were present in all model cassettes evaluated (FIG. 5A, 5B). This cassette design was used to study immunogenicity as well as pharmacology and toxicology studies in multiple species.

[0597] XIII.B.5. Antigen Cassette Design and Evaluation for 30, 40, and 50 Antigens

[0598] Large antigen cassettes were designed that had either 30 (L), 40 (XL) or 50 (XXL) epitopes, each 25 amino acids in length. The epitopes were a mix of human, NHP and mouse epitopes to model infectious disease antigens. FIG. 21 illustrates the general organization of the epitopes from the various species. The model antigens used are described in Tables 7, 8 and 9 for human, primate, and mouse model epitopes, respectively. Each of Tables 7, 8 and 9 described the epitope position, name, minimal epitope description, and MHC class.

[0599] These cassettes were cloned into the chAd68 and alphavirus vaccine vectors as described to evaluate the efficacy of longer multiple-epitope cassettes. FIG. 22 shows that each of the large antigen cassettes were expressed from a ChAdV vector as indicated by at least one major band of the expected size by Western blot.

[0600] Mice were immunized as described to evaluate the efficacy of the large cassettes. T cell responses were analyzed by ICS and tetramer staining following immunization with a chAd68 vector (FIG. 23/Table 10 and FIG. 24/Table 11, respectively) and by ICS following immunization with a srRNA vector (FIG. 25/Table 12) for epitopes AH1 (top panels) and SINNFEKL (SEQ ID NO: 112) (bottom panels). Immunizations using chAd68 and srRNA vaccine vectors expressing either 30 (L), 40 (XL) or 50 (XXL) epitopes induced CD8+ immune responses to model disease epitopes.

TABLE 7
Human epitopes in large cassettes (SEQ ID NOS 174-203, respectively, in order of columns)

| Epitope | | | | | | | | | |
|---|---|---|---|---|---|---|---|---|---|
| position | | | | | | | | | |
| in each | | | | | | | | | |
| cassette | | | | | | | | | |
| L | XL | XXL | Name | Minimal epitope | 25mer | MHC | Restriction | Strain | Species |
| 3 | 3 | 3 | 5.influenza M | GILGFVFTL | PILSPLTKGILGFVFTITVPSERGL | Class I | A*02:01 | Human | Human |
| 6 | 6 | 6 | 4.HTLV-1 Tax | LLFGYPVYV | HFPGFGQSLLFGYPVYVFGDCVQGD | Class I | A*02:01 | Human | Human |
| 9 | 9 | 9 | 3.EBV BMLF1 | GLCTLVAML | RMQAIQNAGLCTLVAMLEETIFWLQ | Class I | A*02:01 | Human | Human |
| 12 | 12 | 12 | 1.HCMV pp65 | NLVPMVATV | WQAGILARNLVPMVATVQGQNLKYQ | Class I | A*02:01 | Human | Human |
| 15 | 15 | 15 | 2.EBV LMP2A | CLGGLLTMV | RTYGPVFMCLGGLLTMVAGAVWLTV | Class I | A*02:01 | Human | Human |
| 18 | 18 | 18 | CT83 | NTDNNLAVY | SSSGLINSNTDNNLAVYDLSRDILN | Class I | A*01:01 | Human | Human |
| | 21 | 21 | MAGEA6 | EVDPIGHVY | LVFGIELMEVDPIGHVYIFATCLGL | Class I | B*35.01 | Human | Human |
| 21 | 25 | 25 | CT83 | LLASSILCA | MNFYLLLASSILCALIVFWKYRRFQ | Class I | A*02:01 | Human | Human |
| 24 | 31 | 28 | FOXE1 | AIFPGAVPAA | AAAAAAAAIFPGAVPAARPPYPGAV | Class I | A'02:01 | Human | Human |
| 27 | 35 | 32 | CT83 | VYDISRDIL | SNTDNNLAVYDLSRDILNNFPHSIA | Class I | A*24:02 | Human | Human |
| | 38 | 36 | MAGE3/6 | ASSLPTTMNY | DPPQSPQGASSLPTTMNYPLWSQSY | Class I | A*01:01 | Human | Human |
| 30 | 40 | 40 | Influenza HA | PKYVKQNTLKLAT | ITYGACPKYVKQNTLKLATGMRNVP | Class II | DRB1*0101 | Human | Human |
| | | 44 | CMV pp65 | LPLKMLNIPSINVH | SIYVYALPLKMLNIPSINVHHYPSA | Class II | DRBl*0101 | Human | Human |
| | | 47 | EBV EBNA3A | PEQWMFQGAPPSQGT | EGPWVPEQWMFQGAPPSQGTDVVQH | Class II | DRB1*0102 | Human | Human |
| | | 50 | CMV pp65 | EHPTFTSQYRIQGKL | RGPQYSEHPTFTSQYRIQGKLEYRH | Class II | DRBl*1101 | Human | Human |

TABLE 8
NHP epitopes in large cassettes (SEQ ID NOS 204-233, respectively, in order of columns)

| Epitope | | | | | | | | | |
|---|---|---|---|---|---|---|---|---|---|
| position | | | | | | | | | |
| in each | | | | | | | | | |
| cassette | | | | | | | | | |
| L | XL | XXL | Name | Minimal epitope | 25mer | MHC | Restriction | Strain | Species |
| 1 | 1 | 1 | Gag CM9 | CTPYDINQM | MFQALSEGCTPYDINQMLNVLGDHQ | Class I | Mamu-A*01 | Rhesus | NHP |
| 4 | 4 | 4 | Tat TL8 | TTPESANL | SCISEADATTPESANLGEEILSQLY | Class I | Mamu-A*01 | Rhesus | NHP |
| 7 | 7 | 7 | Env CL9 | CAPPGYALL | WDAIRFRYCAPPGYALLRCNDTNYS | Class I | Mamu-A*01 | Rhesus | NHP |
| 10 | 10 | 10 | Pol SV9 | SGPKTNIIV | AFLMALTDSGPKTNIIVDSQYVMGI | Class I | Mamu-A*01 | Rhesus | NHP |
| 13 | 13 | 13 | Gag LW9 | LSPRTLNAW | GNVWVHTPLSPRTLNAWVKAVEEKK | Class I | Mamu-A*01 | Rhesus | NHP |
| | | 16 | Env_TL9 | TVPWPNASL | AFRQVCHTTVPWPNASLTPKWNNET | Class I | Mamu-A*01 | Rhesus | NHP |
| 16 | 16 | 19 | Ag856 | PNGTHSWEYWGAQLN | VFNEPPNGTHSWEYWGAQLNAMKGD | Class II | Mamu-DR*W | Rhesus | NHP |
| 19 | 19 | 23 | HIV-1 Env | YKYKVVKIEPLGV | NWRSELYKYKVVKIEPLGVAPTKAK | Class II | Mamu-DR*W | Rhesus | NHP |
| | | 26 | Gag TE15 | TEEAKQIVQRHLVVE | EKVKHTEEAKQIVQRHLVVETGTTE | Class II | Mamu-DRB* [symbol] | Rhesus | NHP |
| | 23 | 30 | CFP-10 36-48 | AGSLQGQWRGAAG | DQVESTAGSLQGQWRGAAGTAAQAA | Class II | Mafa-DRB1* [symbol] | Cyno | NHP |
| | 27 | 34 | CFP-10 71-86 | EISTNIRQAGVQYSRA | QELDEISTNIRQAGVQYSRADEEQQ | Class II | Mafa-DRB1* [symbol] | Cyno | NHP |
| 22 | 29 | 38 | Env 338-346 | RPKQAWCWF | FHSQPINERPKQAWCWEGGSWKEAI | Class I | Mafa-A1*06 [symbol] | Cyno | NHP |
| 25 | 33 | 42 | Nef 103-111 | RPKVPLRTM | DDIDEEDDDLVGVSVRPKVPLRTMS | Class I | Mafa-A1*06 [symbol] | Cyno | NHP |
| 28 | 37 | 45 | Gag 386-394 | GPRKPIKCW | PFAAAQQRGPRKPIKCWNCGKEGHS | Class I | Mafa-A1*06 [symbol] | Cyno | NHP |
| | | 48 | Nef LT9 | LNMADKKET | RRLTARGLLNMADKKETRTPKKAKA | Class I | Mafa-B*104 [symbol] | Cyno | NHP |

[symbol]

indicates data missing or illegible when filed

TABLE 9
Mouse epitopes in large cassettes (SEQ ID NOS 234-273, respectively, in order of columns)

| Epitope | | | | | | | | | |
|---|---|---|---|---|---|---|---|---|---|
| position | | | | | | | | | |
| in each | | | | | | | | | |
| cassette | | | | | | | | | |
| L | XL | XXL | Name | Minimal epitope | 25mer | MHC | Restriction | Strain | Species |
| 2 | 2 | 2 | OVA257 | SIINFEKL | VSGLEQLESIINFEKLTEWTSSNVM | Class I | H2-Kb | B6 | Mouse |
| | | 5 | B16-EGP | EGPRNQDWL | ALLAVGALEGPRNQDWLGVPRQLVT | Class I | H2-Db | B6 | Mouse |
| | | 8 | B16-TRP1 | TAPDNLGYM | VTNTEMFVTAPDNIGYMYEVQWPGQ | Class I | H2-Db | B6 | Mouse |
| | | | 455-463 | | | | | | |
| | | 11 | Trp2180-188 | SVYDFFVWL | TQPQIANCSVYDFFVWLHYYSVRDT | Class I | H2-Kb | B6 | Mouse |
| 5 | 5 | 14 | CT26 AH1-A5 | SPSYAYMQF | LWPRVTYHSPSYAYHQFERRAKYKR | Class I | H2-Ld | Balb/C | Mouse |
| | 8 | 17 | CT26 AH1-39 | MNKYAYHML | LWPRVTYHMNKYAYHMLERRAKYKR | Class I | H2-Ld | Balb/C | Mouse |
| | 11 | 20 | MC38 Dpagt1 | SIIVFNLL | GQSLVISASIIVFNLLELEGDYRDD | Class I | H2-Kb | B6 | Mouse |
| | 14 | 22 | MC38 Adpgk | ASMTNMELM | GIPVHLELASMTNMELMSSIVHQQV | Class I | H2-Db | B6 | Mouse |
| | 17 | 24 | MC38 Reps1 | AQLANDVVL | RVLELFRAAQLANDVVLQIMELCGA | Class I | H2-Db | B6 | Mouse |
| 8 | 20 | 27 | P815 P1A 35-44 | LPYLGWLVF | HRYSLEEILPYLGWLVFAVVTTSFL | Class I | H2-Ld | DBA/2 | Mouse |
| 11 | 22 | 29 | P815 PIE | GYCGLRGTGV | YLSKNPDGYCGLRGTGVSCPMAIKK | Class I | H2-Kd | DBA/2 | Mouse |
| 14 | 24 | 31 | Panc02 | LSIFKHKL | NEIPFTYEQLSIFKHKLDKTYPQGY | Class I | H2-Kb | B6 | Mouse |
| | | | Mesothelin | | | | | | |
| 17 | 26 | 33 | Panc02 | LIWIPALL | SRASLLGPGFVLIWIPALLPALRLS | Class I | H2-Kb | B6 | Mouse |
| | | | Mesothelin | | | | | | |
| 20 | 28 | 35 | ID8 FRa | SSGHNECPV | NWHKGWNWSSGHNECPVGASCHPFT | Class I | H2-Kb | B6 | Mouse |
| | | | 161-169 | | | | | | |
| 23 | 30 | 37 | ID8 Mesothelin | GQKMMAQAI | KTLLKVSKGQKMNAQAIALVACYLR | Class I | H2-Db | B6 | Mouse |
| | | | 40 [symbol] | | | | | | |
| 26 | 32 | 39 | OVA-II | ISQAVHAAHAEINEA | ESLKISQAVHAAHAEINEAGREVVG | Class II | I-Ab, I-Ad | B6 | Mouse |
| | | | | GR | | | | | |
| 29 | 34 | 41 | ESAT-6 | MTEQQWNFAGIEAAA | MTEQQWNFAGIEAAASAIQGNVTSI | Class II | I-Ab | B6 | Mouse |
| | | | | SAIQ | | | | | |
| | 36 | 43 | TT p30 | FNNFTVSFWLRVPKV | DMFNNFTVSFWLRVPKVSASHLEQY | Class II | I-Ad | Balb/C | Mouse |
| | | | | SASHL | | | | | |
| | 39 | 46 | HEL | DGSTDYGILQINSRW | TNRNTDGSTDYGILQINSRWWCNDG | Class II | I-Ak | C8A | Mouse |
| | | 49 | MOG | MEVGWYRSPFSRVVH | TGMEVGWYRSPFSRVVHLYRNGKDQ | Class II | I-Ab | B6 | Mouse |
| | | | | LYRN | | | | | |

[symbol]

indicates data missing or illegible when filed

TABLE 10
Average IFNg+ cells in response to AH1 and
SIINFEKL (SEQ ID NO: 113) peptides in ChAd
large cassette treated mice. Data is presented
as % of total CD8 cells. Shown is average and
standard deviation per group and p-value by
ANOVA with Tukey's test. All p-values compared
to MAG 20-antigen cassette.

| # | | | Standard | | |
|---|---|---|---|---|---|
| antigens | Antigen | Average | deviation | p-value | N |
| 20 | SIINFEKL | 5.308 | 0.660 | n/a | 8 |
| | (SEQ ID | | | | |
| | NO: 114) | | | | |
| 30 | SIINFEKL | 4.119 | 1.019 | 0.978 | 8 |
| | (SEQ ID | | | | |
| | NO: 115) | | | | |
| 40 | SIINFEKL | 6.324 | 0.954 | 0.986 | 8 |
| | (SEQ ID | | | | |
| | NO: 116) | | | | |
| 50 | SIINFEKL | 8.169 | 1.469 | 0.751 | 8 |
| | (SEQ ID | | | | |
| | NO: 117) | | | | |
| 20 | AH1 | 6.405 | 2.664 | n/a | 8 |
| 30 | AH1 | 4.373 | 1.442 | 0.093 | 8 |
| 40 | AH1 | 4.126 | 1.135 | 0.050 | 8 |
| 50 | AH1 | 4.216 | 0.808 | 0.063 | 8 |

TABLE 11
Average tetramer+ cells for AH1 and SIINFEKL
(SEQ ID NO: 118) antigens in ChAd large
cassette treated mice. Data is presented as
% of total CD8 cells. Shown is average and
standard deviation per group and p-value by
ANOVA with Tukey's test. All p-values
compared to MAG 20-antigen cassette.

| # | | | Standard | | |
|---|---|---|---|---|---|
| antigens | Antigen | Average | deviation | p-value | N |
| 20 | SIINFEKL | 10.314 | 2.384 | n/a | 8 |
| | (SEQ ID | | | | |
| | NO: 119) | | | | |
| 30 | SIINFEKL | 4.551 | 2.370 | 0.003 | 8 |
| | (SEQ ID | | | | |
| | NO: 120) | | | | |
| 40 | SIINFEKL | 5.186 | 3.254 | 0.009 | 8 |
| | (SEQ ID | | | | |
| | NO: 121) | | | | |
| 50 | SIINFEKL | 14.113 | 3.660 | 0.072 | 8 |
| | (SEQ ID | | | | |
| | NO: 122) | | | | |
| 20 | AH1 | 6.864 | 2.207 | n/a | 8 |
| 30 | AH1 | 4.713 | 0.922 | 0.036 | 8 |
| 40 | AH1 | 5.393 | 1.452 | 0.223 | 8 |
| 50 | AH1 | 5.860 | 1.041 | 0.543 | 8 |

TABLE 12
Average IFNg+ cells in response to AH1 and
SIINFEKL (SEQ ID NO: 123) peptides in SAM
large cassette treated mice. Data is presented
as % of total CD8 cells. Shown is average and
standard deviation per group and p-value by
ANOVA with Tukey's test. All p-values compared
to MAG 20-antigen cassette.

| # | | | Standard | | |
|---|---|---|---|---|---|
| antigens | Antigen | Average | deviation | p-value | N |
| 20 | SIINFEKL | 1.843 | 0.422 | n/a | 8 |
| | (SEQ ID | | | | |
| | NO: 124) | | | | |
| 30 | SIINFEKL | 2.112 | 0.522 | 0.879 | 7 |
| | (SEQ ID | | | | |
| | NO: 125) | | | | |
| 40 | SIINFEKL | 1.754 | 0.978 | 0.995 | 7 |
| | (SEQ ID | | | | |
| | NO: 126) | | | | |
| 50 | SIINFEKL | 1.409 | 0.766 | 0.606 | 8 |
| | (SEQ ID | | | | |
| | NO: 127) | | | | |
| 20 | AH1 | 3.050 | 0.909 | n/a | 8 |
| 30 | AH1 | 0.618 | 0.427 | 1.91E−05 | 7 |
| 40 | AH1 | 1.286 | 0.284 | 0.001 | 7 |
| 50 | AH1 | 1.309 | 1.149 | 0.001 | 8 |

### XIV. Example 2: ChAd Antigen Cassette Delivery Vector

[0601] XIV.A. ChAd Antigen Cassette Delivery Vector Construction

[0602] In one example, Chimpanzee adenovirus (ChAd) was engineered to be a delivery vector for antigen cassettes. In a further example, a full-length ChAdV68 vector was synthesized based on AC_000011.1 (sequence 2 from U.S. Pat. No. 6,083,716) with E1 (nt 457 to 3014) and E3 (nt 27,816-31,332) sequences deleted. Reporter genes under the control of the CMV promoter/enhancer were inserted in place of the deleted E1 sequences. Transfection of this clone into HEK293 cells did not yield infectious virus. To confirm the sequence of the wild-type C68 virus, isolate VR-594 was obtained from the ATCC, passaged, and then independently sequenced (SEQ ID NO:10). When comparing the AC_000011.1 sequence to the ATCC VR-594 sequence (SEQ ID NO:10) of wild-type ChAdV68 virus, 6 nucleotide differences were identified. In one example, a modified ChAdV68 vector was generated based on AC_000011.1, with the corresponding ATCC VR-594 nucleotides substituted at five positions (ChAdV68.5WTnt SEQ ID NO:1).

[0603] In another example, a modified ChAdV68 vector was generated based on AC_000011.1 with E1 (nt 577 to 3403) and E3 (nt 27,816-31,332) sequences deleted and the corresponding ATCC VR-594 nucleotides substituted at four positions. A GFP reporter (ChAdV68.4WTnt.GFP; SEQ ID NO:11) or model antigen cassette (ChAdV68.4WTnt.MAG25mer; SEQ ID NO:12) under the control of the CMV promoter/enhancer was inserted in place of deleted E1 sequences.

[0604] In another example, a modified ChAdV68 vector was generated based on AC_000011.1 with E1 (nt 577 to 3403) and E3 (nt 27,125-31,825) sequences deleted and the corresponding ATCC VR-594 nucleotides substituted at five positions. A GFP reporter (ChAdV68.5WTnt.GFP; SEQ ID NO:13) or model antigen cassette (ChAdV68.5WTnt.MAG25mer; SEQ ID NO:2) under the control of the CMV promoter/enhancer was inserted in place of deleted E1 sequences

[0605] Relevant vectors are described below:
[0606] Full-Length ChAdVC68 sequence “ChAdV68.5WTnt” (SEQ ID NO:1); AC_000011.1 sequence with corresponding ATCC VR-594 nucleotides substituted at five positions.
[0607] ATCC VR-594 C68 (SEQ ID NO:10); Independently sequenced; Full-Length C68
[0608] ChAdV68.4WTnt.GFP (SEQ ID NO:11); AC_000011.1 with E1 (nt 577 to 3403) and E3 (nt 27,816-31332) sequences deleted; corresponding ATCC VR-594 nucleotides substituted at four positions: GFP reporter under the control of the CMV promoter/enhancer inserted in place of deleted E1
[0609] ChAdV68.4WTnt.MAG25mer (SEQ ID NO:12); AC_000011.1 with E1 (nt 577 to 3403) and E3 (nt 27,816-31,332) sequences deleted; corresponding ATCC VR-594 nucleotides substituted at four positions; model antigen cassette under the control of the CMV promoter/enhancer inserted in place of deleted E1
[0610] ChAdV68.5WTnt.GFP (SEQ ID NO:13); AC_000011.1 with E1 (nt 577 to 3403) and E3 (nt 27,125-31,825) sequences deleted; corresponding ATCC VR-594 nucleotides substituted at five positions; GFP reporter under the control of the CMV promoter/enhancer inserted in place of deleted E1

[0611] XIV.B. ChAd Antigen Cassette Delivery Vector Testing

[0612] XIV.B.1. ChAd Vector Evaluation Methods and Materials

### Transfection of HEK293A Cells Using Lipofectamine

[0613] DNA for the ChAdV68 constructs (ChAdV68.4WTnt.GFP, ChAdV68.5WTnt.GFP, ChAdV68.4WTnt.MAG25mer and ChAdV68.5WTnt.MAG25mer) was prepared and transfected into HEK293A cells using the following protocol.

[0614] 10 ug of plasmid DNA was digested with PacI to liberate the viral genome. DNA was then purified using GeneJet DNA cleanup Micro columns (Thermo Fisher) according to manufacturer's instructions for long DNA fragments, and eluted in 20 ul of pre-heated water; columns were left at 37 degrees for 0.5-1 hours before the elution step.

[0615] HEK293A cells were introduced into 6-well plates at a cell density of 10⁶ cells/well 14-18 hours prior to transfection. Cells were overlaid with 1 ml of fresh medium (DMEM-10% hiFBS with pen/strep and glutamate) per well. 1-2 ug of purified DNA was used per well in a transfection with twice the ul volume (2-4 ul) of Lipofectamine2000, according to the manufacturer's protocol. 0.5 ml of OPTI-MEM medium containing the transfection mix was added to the 1 ml of normal growth medium in each well, and left on cells overnight.

[0616] Transfected cell cultures were incubated at 37° C. for at least 5-7 days. If viral plaques were not visible by day 7 post-transfection, cells were split 1:4 or 1:6, and incubated at 37° C. to monitor for plaque development. Alternatively, transfected cells were harvested and subjected to 3 cycles of freezing and thawing and the cell lysates were used to infect HEK293A cells and the cells were incubated until virus plaques were observed.

Transfection of ChAdV68 Vectors into HEK293A Cells Using Calcium Phosphate and Generation of the Tertiary Viral Stock

[0617] DNA for the ChAdV68 constructs (ChAdV68.4WTnt.GFP, ChAdV68.5WTnt.GFP, ChAdV68.4WTnt.MAG25mer, ChAdV68.5WTnt.MAG25mer) was prepared and transfected into HEK293A cells using the following protocol.

[0618] HEK293A cells were seeded one day prior to the transfection at 10⁶ cells/well of a 6 well plate in 5% BS/DMEM/1×P/S, 1×Glutamax. Two wells are needed per transfection. Two to four hours prior to transfection the media was changed to fresh media. The ChAdV68.4WTnt.GFP plasmid was linearized with PacI. The linearized DNA was then phenol chloroform extracted and precipitated using one tenth volume of 3M Sodium acetate pH 5.3 and two volumes of 100% ethanol. The precipitated DNA was pelleted by centrifugation at 12,000×g for 5 min before washing 1× with 70% ethanol. The pellet was air dried and re-suspended in 50 μL of sterile water. The DNA concentration was determined using a NanoDrop™ (ThermoFisher) and the volume adjusted to 5 μg of DNA/50 μL.

[0619] 169 μL of sterile water was added to a microfuge tube. 5 μL of 2M CaCl₂ was then added to the water and mixed gently by pipetting. 50 μL of DNA was added dropwise to the CaCl₂ water solution. Twenty six μL of 2M CaCl₂ was then added and mixed gently by pipetting twice with a micro-pipetor. This final solution should consist of 5 μg of DNA in 250 μL of 0.25M CaCl₂. A second tube was then prepared containing 250 μL of 2×HBS (Hepes buffered solution). Using a 2 mL sterile pipette attached to a Pipet-Aid air was slowly bubbled through the 2×HBS solution. At the same time the DNA solution in the 0.25M CaCl₂ solution was added in a dropwise fashion. Bubbling was continued for approximately 5 seconds after addition of the final DNA droplet. The solution was then incubated at room temperature for up to 20 minutes before adding to 293A cells. 250 μL of the DNA/Calcium phosphate solution was added dropwise to a monolayer of 293A cells that had been seeded one day prior at 10⁶ cells per well of a 6 well plate. The cells were returned to the incubator and incubated overnight. The media was changed 24 h later. After 72 h the cells were split 1:6 into a 6 well plate. The monolayers were monitored daily by light microscopy for evidence of cytopathic effect (CPE). 7-10 days post transfection viral plaques were observed and the monolayer harvested by pipetting the media in the wells to lift the cells. The harvested cells and media were transferred to a 50 mL centrifuge tube followed by three rounds of freeze thawing (at −80° C. and 37° C.). The subsequent lysate, called the primary virus stock was clarified by centrifugation at full speed on a bench top centrifuge (4300×g) and a proportion of the lysate 10-50%) used to infect 293A cells in a T25 flask. The infected cells were incubated for 48 h before harvesting cells and media at complete CPE. The cells were once again harvested, freeze thawed and clarified before using this secondary viral stock to infect a T150 flask seeded at 1.5×10⁷ cells per flask. Once complete CPE was achieved at 72 h the media and cells were harvested and treated as with earlier viral stocks to generate a tertiary stock.

### Production in 293F Cells

[0620] ChAdV68 virus production was performed in 293F cells grown in 293 FreeStyle™ (ThermoFisher) media in an incubator at 8% C0₂. On the day of infection cells were diluted to 10⁶ cells per mL, with 98% viability and 400 mL were used per production run in 1 L Shake flasks (Corning). 4 mL of the tertiary viral stock with a target MOT of >3.3 was used per infection. The cells were incubated for 48-72 h until the viability was <70% as measured by Trypan blue. The infected cells were then harvested by centrifugation, full speed bench top centrifuge and washed in 1×PBS, re-centrifuged and then re-suspended in 20 mL of 10 mM Tris pH7.4. The cell pellet was lysed by freeze thawing 3× and clarified by centrifugation at 4,300×g for 5 minutes.

### Purification by CsCl Centrifugation

[0621] Viral DNA was purified by CsCl centrifugation. Two discontinuous gradient runs were performed. The first to purify virus from cellular components and the second to further refine separation from cellular components and separate defective from infectious particles.

[0622] 10 mL of 1.2 (26.8 g CsCl dissolved in 92 mL of 10 mM Tris pH 8.0) CsCl was added to polyallomer tubes. Then 8 mL of 1.4 CsCl (53 g CsCl dissolved in 87 mL of 10 mM Tris pH 8.0) was carefully added using a pipette delivering to the bottom of the tube. The clarified virus was carefully layered on top of the 1.2 layer. If needed more 10 mM Tris was added to balance the tubes. The tubes were then placed in a SW-32Ti rotor and centrifuged for 2 h 30 min at 10° C. The tube was then removed to a laminar flow cabinet and the virus band pulled using an 18 gauge needle and a 10 mL syringe. Care was taken not to remove contaminating host cell DNA and protein. The band was then diluted at least 2× with 10 mM Tris pH 8.0 and layered as before on a discontinuous gradient as described above. The run was performed as described before except that this time the run was performed overnight. The next day the band was pulled with care to avoid pulling any of the defective particle band. The virus was then dialyzed using a Slide-a-Lyzer™ Cassette (Pierce) against ARM buffer (20 mM Tris pH 8.0, 25 mM NaCl, 2.5% Glycerol). This was performed 3×, 1 h per buffer exchange. The virus was then aliquoted for storage at −80° C.

### Viral Assays

[0623] VP concentration was performed by using an OD 260 assay based on the extinction coefficient of 1.1×10¹² viral particles (VP) is equivalent to an Absorbance value of 1 at OD260 nm. Two dilutions (1:5 and 1:10) of adenovirus were made in a viral lysis buffer (0.1% SDS, 10 mM Tris pH 7.4, 1 mM EDTA). OD was measured in duplicate at both dilutions and the VP concentration/mL was measured by multiplying the OD260 value X dilution factor X 1.1×10¹²VP.

[0624] An infectious unit (IU) titer was calculated by a limiting dilution assay of the viral stock. The virus was initially diluted 100× in DMEM/5% NS/1× PS and then subsequently diluted using 10-fold dilutions down to 1×10⁻⁷. 100 μL of these dilutions were then added to 293A cells that were seeded at least an hour before at 3e5 cells/well of a 24 well plate. This was performed in duplicate. Plates were incubated for 48 h in a CO2 (5%) incubator at 37° C. The cells were then washed with 1×PBS and were then fixed with 100% cold methanol (−20° C.). The plates were then incubated at −20° C. for a minimum of 20 minutes. The wells were washed with 1×PBS then blocked in 1×PBS/0.1% BSA for 1 h at room temperature. A rabbit anti-Ad antibody (Abcam, Cambridge, Mass.) was added at 1:8,000 dilution in blocking buffer (0.25 ml per well) and incubated for 1 h at room temperature. The wells were washed 4× with 0.5 mL PBS per well. A HRP conjugated Goat anti-Rabbit antibody (Bethyl Labs, Montgomery Tex.) diluted 1000× was added per well and incubated for 1 h prior to a final round of washing. 5 PBS washes were performed and the plates were developed using DAB (Diaminobenzidine tetrahydrochloride) substrate in Tris buffered saline (0.67 mg/mL DAB in 50 mM Tris pH 7.5, 150 mM NaCl) with 0.01% H₂O₂. Wells were developed for 5 min prior to counting. Cells were counted under a 10× objective using a dilution that gave between 4-40 stained cells per field of view. The field of view that was used was a 0.32 mm² grid of which there are equivalent to 625 per field of view on a 24 well plate. The number of infectious viruses/mL can be determined by the number of stained cells per grid multiplied by the number of grids per field of view multiplied by a dilution factor 10. Similarly, when working with GFP expressing cells florescent can be used rather than capsid staining to determine the number of GFP expressing virions per mL.

### Immunizations

[0625] C57BL/6J female mice and Balb/c female mice were injected with 1×10⁸ viral particles (VP) of ChAdV68.5WTnt.MAG25mer in 100 uL volume, bilateral intramuscular injection (50 uL per leg).

### Splenocyte Dissociation

[0626] Spleen and lymph nodes for each mouse were pooled in 3 mL of complete RPMI (RPMI, 10% FBS, penicillin/streptomycin). Mechanical dissociation was performed using the gentleMACS Dissociator (Miltenyi Biotec), following manufacturer's protocol. Dissociated cells were filtered through a 40 micron filter and red blood cells were lysed with ACK lysis buffer (150 mM NH₄C1, 10 mM KHCO₃, 0.1 mM Na₂EDTA). Cells were filtered again through a 30 micron filter and then resuspended in complete RPMI. Cells were counted on the Attune NxT flow cytometer (Thermo Fisher) using propidium iodide staining to exclude dead and apoptotic cells. Cell were then adjusted to the appropriate concentration of live cells for subsequent analysis.

### Ex Vivo Enzyme-Linked Immunospot (ELISPOT) Analysis

[0627] ELISPOT analysis was performed according to ELISPOT harmonization guidelines {DOI: 10.1038/nprot.2015.068} with the mouse IFNg ELISpotPLUS kit (MABTECH). 5×10⁴ splenocytes were incubated with 10 uM of the indicated peptides for 16 hours in 96-well IFNg antibody coated plates. Spots were developed using alkaline phosphatase. The reaction was timed for 10 minutes and was terminated by running plate under tap water. Spots were counted using an AID vSpot Reader Spectrum. For ELISPOT analysis, wells with saturation >50% were recorded as “too numerous to count”. Samples with deviation of replicate wells >10% were excluded from analysis. Spot counts were then corrected for well confluency using the formula: spot count+2x(spot count x % confluence/[100%−% confluence]). Negative background was corrected by subtraction of spot counts in the negative peptide stimulation wells from the antigen stimulated wells. Finally, wells labeled too numerous to count were set to the highest observed corrected value, rounded up to the nearest hundred.

[0628] XIV.B.2. Production of ChAdV68 Viral Delivery Particles after DNA Transfection

[0629] In one example, ChAdV68.4WTnt.GFP (FIG. 6) and ChAdV68.5WTnt.GFP (FIG. 7) DNA was transfected into HEK293A cells and virus replication (viral plaques) was observed 7-10 days after transfection. ChAdV68 viral plaques were visualized using light (FIGS. 6A and 7A) and fluorescent microscopy (FIG. 6B-C and FIG. 7B-C). GFP denotes productive ChAdV68 viral delivery particle production.

[0630] XIV.B.3. ChAdV68 Viral Delivery Particles Expansion

[0631] In one example, ChAdV68.4WTnt.GFP, ChAdV68.5WTnt.GFP, and ChAdV68.5WTnt.MAG25mer viruses were expanded in HEK293F cells and a purified virus stock produced 18 days after transfection (FIG. 8). Viral particles were quantified in the purified ChAdV68 virus stocks and compared to adenovirus type 5 (Ad5) and ChAdVY25 (a closely related ChAdV; Dicks, 2012, PloS ONE 7, e40385) viral stocks produced using the same protocol. ChAdV68 viral titers were comparable to Ad5 and ChAdVY25 (Table 13).

TABLE 13
Adenoviral vector production in 293F suspension cells

| Construct | Average VP/cell +/− SD |
|---|---|
| Ad5-Vectors (Multiple vectors) | 2.96e4 +/− 2.26e4 |
| Ad5-GFP | 3.89e4 |
| chAdY25-GFP | 1.75e3 +/− 6.03e1 |
| ChAdV68.4WTnt.GFP | 1.2e4 +/− 6.5e3 |
| ChAdV68.5WTnt.GFP | 1.8e3 |
| ChAdV68.5WTnt.MAG25mer | 1.39e3 +/− 1.1e3 |

*SD is only reported where multiple Production runs have been performed

[0632] XIV.B.4. Evaluation of Immunogenicity

[0633] C68 vector expressing mouse tumor antigens were evaluated in mouse immunogenicity studies to demonstrate the C68 vector elicits T-cell responses. T-cell responses to the MHC class I epitope SIINFEKL (SEQ ID NO: 128) were measured in C57BL/6J female mice and the MHC class I epitope AH1-A5 (Slansky et al., 2000, Immunity13:529-538) measured in Balb/c mice. As shown in FIG. 14, strong T-cell responses relative to control were measured after immunization of mice with ChAdV68.5WTnt.MAG25mer. Mean cellular immune responses of 8957 or 4019 spot forming cells (SFCs) per 10⁶ splenocytes were observed in ELISpot assays when C57BL/6J or Balb/c mice were immunized with ChAdV68.5WTnt.MAG25mer, respectively, 10 days after immunization.

[0634] Tumor infiltrating lymphocytes were also evaluated in CT26 tumor model evaluating ChAdV and co-administration of a an anti-CTLA4 antibody. Mice were implanted with CT26 tumors cells and 7 days after implantation, were immunized with ChAdV vaccine and treated with anti-CTLA4 antibody (clone 9D9) or IgG as a control. Tumor infiltrating lymphocytes were analyzed 12 days after immunization. Tumors from each mouse were dissociated using the gentleMACS Dissociator (Miltenyi Biotec) and mouse tumor dissociation kit (Miltenyi Biotec). Dissociated cells were filtered through a 30 micron filter and resuspended in complete RPMI. Cells were counted on the Attune NxT flow cytometer (Thermo Fisher) using propidium iodide staining to exclude dead and apoptotic cells. Cell were then adjusted to the appropriate concentration of live cells for subsequent analysis. Antigen specific cells were identified by MHC-tetramer complexes and co-stained with anti-CD8 and a viability marker. Tumors were harvested 12 days after prime immunization.

[0635] Antigen-specific CD8+ T cells within the tumor comprised a median of 3.3%, 2.2%, or 8.1% of the total live cell population in ChAdV, anti-CTLA4, and ChAdV+anti-CTLA4 treated groups, respectively (FIG. 33 and Table 14). Treatment with anti-CTLA in combination with active ChAdV immunization resulted in a statistically significant increase in the antigen-specific CD8+ T cell frequency over both ChAdV alone and anti-CTLA4 alone demonstrating anti-CTLA4, when co-administered with the chAd68 vaccine, increased the number of infiltrating T cells within a tumor.

TABLE 14
Tetramer+ infiltrating CD8 T cell frequencies in CT26 tumors

| Treatment | Median % tetramer+ |
|---|---|
| ChAdV68.5WTnt.MAG25mer | 3.3 |
| (ChAdV) | |
| Anti-CTLA4 | 2.2 |
| ChAdV68.5WTnt.MAG25mer | 8.1 |
| (ChAdV) + anti-CTLA4 | |

### XV. Example 3: Alphavirus Antigen Cassette Delivery Vector

[0636] XV.A. Alphavirus Delivery Vector Evaluation Materials and Methods

### In Vitro Transcription to Generate RNA

[0637] For in vitro testing: plasmid DNA was linearized by restriction digest with PmeI, column purified following manufacturer's protocol (GeneJet DNA cleanup kit, Thermo) and used as template. In vitro transcription was performed using the RiboMAX Large Scale RNA production System (Promega) with the m⁷G cap analog (Promega) according to manufacturer's protocol. mRNA was purified using the RNeasy kit (Qiagen) according to manufacturer's protocol.

[0638] For in vivo studies: RNA was generated and purified by TriLInk Biotechnologies and capped with Enzymatic Cap1.

### Transfection of RNA

[0639] HEK293A cells were seeded at 6e4 cells/well for 96 wells and 2e5 cells/well for 24 wells, ˜16 hours prior to transfection. Cells were transfected with mRNA using MessengerMAX lipofectamine (Invitrogen) and following manufacturer's protocol. For 96-wells, 0.15 uL of lipofectamine and 10 ng of mRNA was used per well, and for 24-wells, 0.75 uL of lipofectamine and 150 ng of mRNA was used per well. A GFP expressing mRNA (TriLink Biotechnologies) was used as a transfection control.

### Luciferase Assay

[0640] Luciferase reporter assay was performed in white-walled 96-well plates with each condition in triplicate using the ONE-Glo luciferase assay (Promega) following manufacturer's protocol. Luminescence was measured using the SpectraMax.

qRT-PCR

[0641] Transfected cells were rinsed and replaced with fresh media 2 hours post transfection to remove any untransfected mRNA. Cells were then harvested at various timepoints in RLT plus lysis buffer (Qiagen), homogenized using a QiaShredder (Qiagen) and RNA was extracted using the RNeasy kit (Qiagen), all according to manufacturer's protocol. Total RNA was quantified using a Nanodrop (Thermo Scientific). qRT-PCR was performed using the Quantitect Probe One-Step RT-PCR kit (Qiagen) on the qTower³ (Analytik Jena) according to manufacturer's protocol, using 20 ng of total RNA per reaction. Each sample was run in triplicate for each probe. Actin or GusB were used as reference genes. Custom primer/probes were generated by IDT (Table 15).

TABLE 15
qPCR primers/probes

| Target | | |
|---|---|---|
| Luci | Primer1 | GTGGTGTGCAGCGAGAATAG (SEQ ID NO: |
| | | 129) |
| | Primer2 | CGCTCGTTGTAGATGTCGTTAG (SEQ ID NO: |
| | | 130) |
| | Probe | /56-FAM/TTGCAGTTC/ZEN/TTCATGCCCGTG |
| | | TTG/3IABkFQ/ (SEQ ID NO: 131) |
| GusB | Primer1 | GTTTTTGATCCAGACCCAGATG (SEQ ID NO: |
| | | 132) |
| | Primer2 | GCCCATTATTCAGAGCGAGTA (SEQ ID NO: |
| | | 133) |
| | Probe | /56-FAM/TGCAGGGTT/ZEN/TCACCAGGATCC |
| | | AC/3IABkFQ/ (SEQ ID NO: 134) |
| ActB | Primer1 | CCTTGCACATGCCGGAG (SEQ ID NO: 135) |
| | Primer2 | ACAGAGCCTCGCCTTTG (SEQ ID NO: 136) |
| | Probe | /56-FAM/TCATCCATG/ZEN/GTGAGCTGGCGG/ |
| | | 3IABkFQ/ (SEQ ID NO: 137) |
| MAG- | Primer1 | CTGAAAGCTCGGTTTGCTAATG (SEQ ID NO: |
| 25mer | | 138) |
| Set1 | Primer2 | CCATGCTGGAAGAGACAATCT (SEQ ID NO: |
| | | 139) |
| | Probe | /56-FAM/CGTTTCTGA/ZEN/TGGCGCTGACCG |
| | | ATA/3IABkFQ/ (SEQ ID NO: 140) |
| MAG- | Primer1 | TATGCCTATCCTGTCTCCTCTG (SEQ ID NO: |
| 25mer | | 141) |
| Set2 | Primer2 | GCTAATGCAGCTAAGTCCTCTC (SEQ ID NO: |
| | | 142) |
| | Probe | /56-FAM/TGTTTACCC/ZEN/TGACCGTGCCTT |
| | | CTG/3IABkFQ/ (SEQ ID NO: 143) |

### B16-OVA Tumor Model

[0642] C57BL/6J mice were injected in the lower left abdominal flank with 10⁵ B16-OVA cells/animal. Tumors were allowed to grow for 3 days prior to immunization.

### CT26 Tumor Model

[0643] Balb/c mice were injected in the lower left abdominal flank with 10⁶ CT26 cells/animal. Tumors were allowed to grow for 7 days prior to immunization.

### Immunizations

[0644] For srRNA vaccine, mice were injected with 10 ug of RNA in 100 uL volume, bilateral intramuscular injection (50 uL per leg). For Ad5 vaccine, mice were injected with 5×10¹⁰ viral particles (VP) in 100 uL volume, bilateral intramuscular injection (50 uL per leg). Animals were injected with anti-CTLA-4 (clone 9D9, BioXcell), anti-PD-1 (clone RMP1-14, BioXcell) or anti-IgG (clone MPC-11, BioXcell), 250 ug dose, 2 times per week, via intraperitoneal injection.

### In Vivo Bioluminescent Imaging

[0645] At each timepoint mice were injected with 150 mg/kg luciferin substrate via intraperitoneal injection and bioluminescence was measured using the IVIS In vivo imaging system (PerkinElmer) 10-15 minutes after injection.

### Splenocyte Dissociation

[0646] Spleen and lymph nodes for each mouse were pooled in 3 mL of complete RPMI (RPMI, 10% FBS, penicillin/streptomycin). Mechanical dissociation was performed using the gentleMACS Dissociator (Miltenyi Biotec), following manufacturer's protocol. Dissociated cells were filtered through a 40 micron filter and red blood cells were lysed with ACK lysis buffer (150 mM NH₄C1, 10 mM KHCO₃, 0.1 mM Na₂EDTA). Cells were filtered again through a 30 micron filter and then resuspended in complete RPMI. Cells were counted on the Attune NxT flow cytometer (Thermo Fisher) using propidium iodide staining to exclude dead and apoptotic cells. Cell were then adjusted to the appropriate concentration of live cells for subsequent analysis.

### Ex Vivo Enzyme-Linked Immunospot (ELISPOT) Analysis

[0647] ELISPOT analysis was performed according to ELISPOT harmonization guidelines {DOI: 10.1038/nprot.2015.068} with the mouse IFNg ELISpotPLUS kit (MABTECH). 5×10⁴ splenocytes were incubated with 10 uM of the indicated peptides for 16 hours in 96-well IFNg antibody coated plates. Spots were developed using alkaline phosphatase. The reaction was timed for 10 minutes and was terminated by running plate under tap water. Spots were counted using an AID vSpot Reader Spectrum. For ELISPOT analysis, wells with saturation >50% were recorded as “too numerous to count”. Samples with deviation of replicate wells >10% were excluded from analysis. Spot counts were then corrected for well confluency using the formula: spot count+2x(spot count x % confluence/[100%−% confluence]). Negative background was corrected by subtraction of spot counts in the negative peptide stimulation wells from the antigen stimulated wells. Finally, wells labeled too numerous to count were set to the highest observed corrected value, rounded up to the nearest hundred.

[0648] XV.B. Alphavirus Vector

[0649] XV.B.1. Alphavirus Vector In Vitro Evaluation

[0650] In one implementation of the present invention, a RNA alphavirus backbone for the antigen expression system was generated from a Venezuelan Equine Encephalitis (VEE) (Kinney, 1986, Virology 152: 400-413) based self-replicating RNA (srRNA) vector. In one example, the sequences encoding the structural proteins of VEE located 3′ of the 26S subgenomic promoter were deleted (VEE sequences 7544 to 11,175 deleted; numbering based on Kinney et al 1986; SEQ ID NO:6) and replaced by antigen sequences (SEQ ID NO:14 and SEQ ID NO:4) or a luciferase reporter (e.g., VEE-Luciferase, SEQ ID NO:15) (FIG. 9). RNA was transcribed from the srRNA DNA vector in vitro, transfected into HEK293A cells and luciferase reporter expression was measured. In addition, an (non-replicating) mRNA encoding luciferase was transfected for comparison. An ˜30,000-fold increase in srRNA reporter signal was observed for VEE-Luciferase srRNA when comparing the 23 hour measurement vs the 2 hour measurement (Table 16). In contrast, the mRNA reporter exhibited a less than 10-fold increase in signal over the same time period (Table 16).

TABLE 16
Expression of luciferase from VEE self-replicating vector
increases over time. HEK293A cells transfected with 10 ng
of VEE-Luciferase srRNA or 10 ng of non-replicating
luciferase mRNA (TriLink L-6307) per well in 96 wells.
Luminescence was measured at various times post trans-
fection. Luciferase expression is reported as relative
luminescence units (RLU). Each data point is the
mean +/− SD of 3 transfected wells.

| | Timepoint | | Standard Dev |
|---|---|---|---|
| Construct | (hr) | Mean RLU | (triplicate wells) |
| mRNA | 2 | 878.6666667 | 120.7904522 |
| mRNA | 5 | 1847.333333 | 978.515372 |
| mRNA | 9 | 4847 | 868.3271273 |
| mRNA | 23 | 8639.333333 | 751.6816702 |
| SRRNA | 2 | 27 | 15 |
| SRRNA | 5 | 4884.333333 | 2955.158935 |
| SRRNA | 9 | 182065.5 | 16030.81784 |
| SRRNA | 23 | 783658.3333 | 68985.05538 |

[0651] In another example, replication of the srRNA was confirmed directly by measuring RNA levels after transfection of either the luciferase encoding srRNA (VEE-Luciferase) or an srRNA encoding a multi-epitope cassette (VEE-MAG25mer) using quantitative reverse transcription polymerase chain reaction (qRT-PCR). An ˜150-fold increase in RNA was observed for the VEE-luciferase srRNA (Table 17), while a 30-50-fold increase in RNA was observed for the VEE-MAG25mer srRNA (Table 18). These data confirm that the VEE srRNA vectors replicate when transfected into cells.

TABLE 17
Direct measurement of RNA replication in VEE-Luciferase srRNA transfected
cells. HEK293A cells transfected with VEE-Luciferase srRNA (150 ng per well, 24-well) and
RNA levels quantified by qRT-PCR at various times after transfection. Each measurement
was normalized based on the Actin reference gene and fold-change relative to the 2 hour
timepoint is presented.

| Timepoint | | | | | | Relative Fold |
|---|---|---|---|---|---|---|
| (hr) | Luciferase Ct | Actin Ct | dCt | Ref dCt | ddCt | change |
| 2 | 20.51 | 18.14 | 2.38 | 2.38 | 0.00 | 1.00 |
| 4 | 20.09 | 18.39 | 1.70 | 2.38 | −0.67 | 1.59 |
| 6 | 15.50 | 18.19 | −2.69 | 2.38 | −5.07 | 33.51 |
| 8 | 13.51 | 18.36 | −4.85 | 2.38 | −7.22 | 149.43 |

TABLE 18
Direct measurement of RNA replication in VEE-MAG25mer srRNA transfected
cells. HEK293 cells transfected with VEE-MAG25mer srRNA (150 ng per well, 24-well) and
RNA levels quantified by qRT-PCR at various times after transfection. Each measurement
was normalized based on the GusB reference gene and fold-change relative to the 2 hour
timepoint is presented. Different lines on the graph represent 2 different qPCR primer/probe
sets, both of which detect the epitope cassette region of the srRNA.

| Primer/ | Timepoint | | GusB | | | | Relative |
|---|---|---|---|---|---|---|---|
| probe | (hr) | Ct | Ct | dCt | Ref dCt | ddCt | Fold-Change |
| Set1 | 2 | 18.96 | 22.41 | −3.45 | −3.45 | 0.00 | 1.00 |
| Set1 | 4 | 17.46 | 22.27 | −4.81 | −3.45 | −1.37 | 2.58 |
| Set1 | 6 | 14.87 | 22.04 | −7.17 | −3.45 | −3.72 | 13.21 |
| Set1 | 8 | 14.16 | 22.19 | −8.02 | −3.45 | −4.58 | 23.86 |
| Set1 | 24 | 13.16 | 22.01 | −8.86 | −3.45 | −5.41 | 42.52 |
| Set1 | 36 | 13.53 | 22.63 | −9.10 | −3.45 | −5.66 | 50.45 |
| Set2 | 2 | 17.75 | 22.41 | −4.66 | −4.66 | 0.00 | 1.00 |
| Set2 | 4 | 16.66 | 22.27 | −5.61 | −4.66 | −0.94 | 1.92 |
| Set2 | 6 | 14.22 | 22.04 | −7.82 | −4.66 | −3.15 | 8.90 |
| Set2 | 8 | 13.18 | 22.19 | −9.01 | −4.66 | −4.35 | 20.35 |
| Set2 | 24 | 12.22 | 22.01 | −9.80 | −4.66 | −5.13 | 35.10 |
| Set2 | 36 | 13.08 | 22.63 | −9.55 | −4.66 | −4.89 | 29.58 |

[0652] XV.B.2. Alphavirus Vector In Vivo Evaluation

[0653] In another example, VEE-Luciferase reporter expression was evaluated in vivo. Mice were injected with 10 ug of VEE-Luciferase srRNA encapsulated in lipid nanoparticle (MC3) and imaged at 24 and 48 hours, and 7 and 14 days post injection to determine bioluminescent signal. Luciferase signal was detected at 24 hours post injection and increased over time and appeared to peak at 7 days after srRNA injection (FIG. 10).

[0654] XV.B.3. Alphavirus Vector Tumor Model Evaluation

[0655] In one implementation, to determine if the VEE srRNA vector directs antigen-specific immune responses in vivo, a VEE srRNA vector was generated (VEE-UbAAY, SEQ ID NO:14) that expresses 2 different MHC class I mouse tumor epitopes, SIINFEKL (SEQ ID NO: 144) and AH1-A5 (Slansky et al., 2000, Immunity 13:529-538). The SFL (SIINFEKL (SEQ ID NO: 145)) epitope is expressed by the B16-OVA melanoma cell line, and the AH1-A5 (SPSYAYHQF (SEQ ID NO: 146); Slansky et al., 2000, Immunity) epitope induces T cells targeting a related epitope (AH1/SPSYVYHQF (SEQ ID NO: 147); Huang et al., 1996, Proc Natl Acad Sci USA 93:9730-9735) that is expressed by the CT26 colon carcinoma cell line. In one example, for in vivo studies, VEE-UbAAY srRNA was generated by in vitro transcription using T7 polymerase (TriLink Biotechnologies) and encapsulated in a lipid nanoparticle (MC3).

[0656] A strong antigen-specific T-cell response targeting SFL, relative to control, was observed two weeks after immunization of B16-OVA tumor bearing mice with MC3 formulated VEE-UbAAY srRNA. In one example, a median of 3835 spot forming cells (SFC) per 10⁶ splenocytes was measured after stimulation with the SFL peptide in ELISpot assays (FIG. 11A, Table 19) and 1.8% (median) of CD8 T-cells were SFL antigen-specific as measured by pentamer staining (FIG. 11B, Table 19). In another example, co-administration of an anti-CTLA-4 monoclonal antibody (mAb) with the VEE srRNA vaccine resulted in a moderate increase in overall T-cell responses with a median of 4794.5 SFCs per 10⁶ splenocytes measured in the ELISpot assay (FIG. 11A, Table 19).

TABLE 19
Results of ELISPOT and MHCI-pentamer staining assays 14 days post VEE
srRNA immunization in B16-OVA tumor bearing C57BL/6J mice.

| | | | Pentamer | | | | Pentamer |
|---|---|---|---|---|---|---|---|
| | | SFC/1e6 | positive (% | | | SFC/1e6 | positive (% |
| Group | Mouse | splenocytes | of CD8) | Group | Mouse | splenocytes | of CD8) |
| Control | 1 | 47 | 0.22 | Vax | 1 | 6774 | 4.92 |
| | 2 | 80 | 0.32 | | 2 | 2323 | 1.34 |
| | 3 | 0 | 0.27 | | 3 | 2997 | 1.52 |
| | 4 | 0 | 0.29 | | 4 | 4492 | 1.86 |
| | 5 | 0 | 0.27 | | 5 | 4970 | 3.7 |
| | 6 | 0 | 0.25 | | 6 | | 4.13 |
| | 7 | 0 | 0.23 | | 7 | 3835 | 1.66 |
| | 8 | 87 | 0.25 | | 8 | 3119 | 1.64 |
| aCTLA4 | 1 | 0 | 0.24 | Vax + | 1 | 6232 | 2.16 |
| | 2 | 0 | 0.26 | aCTLA4 | 2 | 4242 | 0.82 |
| | 3 | 0 | 0.39 | | 3 | 5347 | 1.57 |
| | 4 | 0 | 0.28 | | 4 | 6568 | 2.33 |
| | 5 | 0 | 0.28 | | 5 | 6269 | 1.55 |
| | 6 | 0 | 0.28 | | 6 | 4056 | 1.74 |
| | 7 | 0 | 0.31 | | 7 | 4163 | 1.14 |
| | 8 | 6 | 0.26 | | 8 | 3667 | 1.01 |

* Note
that results from mouse #6 in the Vax group were excluded from analysis due to high variability between triplicate wells.

[0657] In another implementation, to minor a clinical approach, a heterologous prime/boost in the B16-OVA and CT26 mouse tumor models was performed, where tumor bearing mice were immunized first with adenoviral vector expressing the same antigen cassette (Ad5-UbAAY), followed by a boost immunization with the VEE-UbAAY srRNA vaccine 14 days after the Ad5-UbAAY prime. In one example, an antigen-specific immune response was induced by the Ad5-UbAAY vaccine resulting in 7330 (median) SFCs per 10⁶ splenocytes measured in the ELISpot assay (FIG. 12A, Table 20) and 2.9% (median) of CD8 T-cells targeting the SFL antigen as measured by pentamer staining (FIG. 12C, Table 20). In another example, the T-cell response was maintained 2 weeks after the VEE-UbAAY srRNA boost in the B16-OVA model with 3960 (median) SFL-specific SFCs per 10⁶ splenocytes measured in the ELISpot assay (FIG. 12B, Table 20) and 3.1% (median) of CD8 T-cells targeting the SFL antigen as measured by pentamer staining (FIG. 12D, Table 20).

TABLE 20
Immune monitoring of B16-OVA mice following heterologous prime/boost with
Ad5 vaccine prime and srRNA boost.

| | | | | | | | |
|---|---|---|---|---|---|---|---|
| | | | Pentamer | | | | Pentamer |
| | | SFC/1e6 | positive | | | SFC/1e6 | positive |
| Group | Mouse | splenocytes | (% of CD8) | Group | Mouse | splenocytes | (% of CD8) |

Day 14

| | | | | | | | |
|---|---|---|---|---|---|---|---|
| Control | 1 | 0 | 0.10 | Vax | 1 | 8514 | 1.87 |
| | 2 | 0 | 0.09 | | 2 | 7779 | 1.91 |
| | 3 | 0 | 0.11 | | 3 | 6177 | 3.17 |
| | 4 | 46 | 0.18 | | 4 | 7945 | 3.41 |
| | 5 | 0 | 0.11 | | 5 | 8821 | 4.51 |
| | 6 | 16 | 0.11 | | 6 | 6881 | 2.48 |
| | 7 | 0 | 0.24 | | 7 | 5365 | 2.57 |
| | 8 | 37 | 0.10 | | 8 | 6705 | 3.98 |
| aCTLA4 | 1 | 0 | 0.08 | Vax + | 1 | 9416 | 2.35 |
| | 2 | 29 | 0.10 | aCTLA4 | 2 | 7918 | 3.33 |
| | 3 | 0 | 0.09 | | 3 | 10153 | 4.50 |
| | 4 | 29 | 0.09 | | 4 | 7212 | 2.98 |
| | 5 | 0 | 0.10 | | 5 | 11203 | 4.38 |
| | 6 | 49 | 0.10 | | 6 | 9784 | 2.27 |
| | 7 | 0 | 0.10 | | 8 | 7267 | 2.87 |
| | 8 | 31 | 0.14 | | | | |

Day 28

| | | | | | | | |
|---|---|---|---|---|---|---|---|
| Control | 2 | 0 | 0.17 | Vax | 1 | 5033 | 2.61 |
| | 4 | 0 | 0.15 | | 2 | 3958 | 3.08 |
| | 6 | 20 | 0.17 | | 4 | 3960 | 3.58 |
| aCTLA4 | 1 | 7 | 0.23 | Vax + | 4 | 3460 | 2.44 |
| | 2 | 0 | 0.18 | aCTLA4 | 5 | 5670 | 3.46 |
| | 3 | 0 | 0.14 | | | | |

[0658] In another implementation, similar results were observed after an Ad5-UbAAY prime and VEE-UbAAY srRNA boost in the CT26 mouse model. In one example, an AH1 antigen-specific response was observed after the Ad5-UbAAY prime (day 14) with a mean of 5187 SFCs per 10⁶ splenocytes measured in the ELISpot assay (FIG. 13A, Table 21) and 3799 SFCs per 10⁶ splenocytes measured in the ELISpot assay after the VEE-UbAAY srRNA boost (day 28) (FIG. 13B, Table 21).

TABLE 21
Immune monitoring after heterologous prime/
boost in CT26 tumor mouse model.
Day 12

| | | SFC/1e6 |
|---|---|---|
| Group | Mouse | splenocytes |
| Control | 1 | 1799 |
| | 2 | 1442 |
| | 3 | 1235 |
| aPD1 | 1 | 737 |
| | 2 | 5230 |
| | 3 | 332 |
| Vax | 1 | 6287 |
| | 2 | 4086 |
| Vax + | 1 | 5363 |
| aPD1 | 2 | 6500 |

Day 21

| | | SFC/1e6 |
|---|---|---|
| Group | Mouse | splenocytes |
| Control | 9 | 167 |
| | 10 | 115 |
| | 11 | 347 |
| aPD1 | 8 | 511 |
| | 11 | 758 |
| Vax | 9 | 3133 |
| | 10 | 2036 |
| | 11 | 6227 |
| Vax + | 8 | 3844 |
| aPD1 | 9 | 2071 |
| | 11 | 4888 |

### XVI. Example 4: Non-Human Primate Studies

[0659] Various dosing protocols using ChAdV68 and self-replicating RNA (srRNA) were evaluated in non-human primates (NHP).

[0660] Materials and Methods

[0661] A priming vaccine was injected intramuscularly (IM) in each NHP to initiate the study (vaccine prime). One or more boosting vaccines (vaccine boost) were also injected intramuscularly in each NHP. Bilateral injections per dose were administered according to groups outlined in tables and summarized below.

### Immunizations

[0662] Mamu-A*01 Indian rhesus macaques were immunized bilaterally with 1×10¹² viral particles (5×10¹¹ viral particles per injection) of ChAdV68.5WTnt.MAG25mer, 30 ug of VEE-MAG25MER srRNA, 100 ug of VEE-MAG25mer srRNA or 300 ug of VEE-MAG25mer srRNA formulated in LNP-1 or LNP-2. Vaccine boosts of 30 ug, 100 ug or 300 ug VEE-MAG25mer srRNA were administered intramuscularly at the indicated time after prime vaccination.

### Immune Monitoring

[0663] PBMCs were isolated at indicated times after prime vaccination using Lymphocyte Separation Medium (LSM, MP Biomedicals) and LeucoSep separation tubes (Greiner Bio-One) and resuspended in RPMI containing 10% FBS and penicillin/streptomycin. Cells were counted on the Attune NxT flow cytometer (Thermo Fisher) using propidium iodide staining to exclude dead and apoptotic cells. Cell were then adjusted to the appropriate concentration of live cells for subsequent analysis. For each monkey in the studies, T cell responses were measured using ELISpot or flow cytometry methods. T cell responses to 6 different rhesus macaque Mamu-A*01 class I epitopes encoded in the vaccines were monitored from PBMCs by measuring induction of cytokines, such as IFN-gamma, using ex vivo enzyme-linked immunospot (ELISpot) analysis. ELISpot analysis was performed according to ELISPOT harmonization guidelines {DOI: 10.1038/nprot.2015.068} with the monkey IFNg ELISpotPLUS kit (MABTECH). 200,000 PBMCs were incubated with 10 uM of the indicated peptides for 16 hours in 96-well IFNg antibody coated plates. Spots were developed using alkaline phosphatase. The reaction was timed for 10 minutes and was terminated by running plate under tap water. Spots were counted using an AID vSpot Reader Spectrum. For ELISPOT analysis, wells with saturation >50% were recorded as “too numerous to count”. Samples with deviation of replicate wells >10% were excluded from analysis. Spot counts were then corrected for well confluency using the formula: spot count+2x(spot count x % confluence/[100%−% confluence]). Negative background was corrected by subtraction of spot counts in the negative peptide stimulation wells from the antigen stimulated wells. Finally, wells labeled too numerous to count were set to the highest observed corrected value, rounded up to the nearest hundred.

[0664] Specific CD4 and CD8 T cell responses to 6 different rhesus macaque Mamu-A*01 class I epitopes encoded in the vaccines were monitored from PBMCs by measuring induction of intracellular cytokines, such as IFN-gamma, using flow cytometry. The results from both methods indicate that cytokines were induced in an antigen-specific manner to epitopes.

[0665] Immunogenicity in Rhesus Macaques

[0666] This study was designed to (a) evaluate the immunogenicity and preliminary safety of VEE-MAG25mer srRNA 30 μg and 100 μg doses as a homologous prime/boost or heterologous prime/boost in combination with ChAdV68.5WTnt.MAG25mer; (b) compare the immune responses of VEE-MAG25mer srRNA in lipid nanoparticles using LNP1 versus LNP2; (c) evaluate the kinetics of T-cell responses to VEE-MAG25mer srRNA and ChAdV68.5WTnt.MAG25mer immunizations.

[0667] The study arm was conducted in Mamu-A*01 Indian rhesus macaques to demonstrate immunogenicity. Select antigens used in this study are only recognized in Rhesus macaques, specifically those with a Mamu-A*01 MHC class I haplotype. Mamu-A*01 Indian rhesus macaques were randomized to the different study arms (6 macaques per group) and administered an IM injection bilaterally with either ChAdV68.5WTnt.MAG25mer or VEE-MAG25mer srRNA vector encoding model antigens that includes multiple Mamu-A*01 restricted epitopes. The study arms were as described below.

TABLE 22
Non-GLP immunogenicity study in Indian Rhesus Macaques

| Group | Prime | Boost 1 | Boost 2 |
|---|---|---|---|
| 1 | VEE-MAG25mer | VEE-MAG25mer | VEE-MAG25mer |
| | srRNA-LNP1 | srRNA-LNP1 | srRNA-LNP1 |
| | (30 μg) | (30 μg) | (30 μg) |
| 2 | VEE-MAG25mer | VEE-MAG25mer | VEE-MAG25mer |
| | srRNA-LNP1 | srRNA-LNP1 | srRNA-LNP1 |
| | (100 μg) | (100 μg) | (100 μg) |
| 3 | VEE-MAG25mer | VEE-MAG25mer | VEE-MAG25mer |
| | srRNA-LNP2 | srRNA-LNP2 | srRNA-LNP2 |
| | (100 μg) | (100 μg) | (100 μg) |
| 4 | ChAdV68.5WTnt. | VEE-MAG25mer | VEE-MAG25mer |
| | MAG25mer | srRNA-LNP1 | srRNA-LNP1 |
| | | (100 μg) | (100 μg) |

[0668] PBMCs were collected prior to immunization and on weeks 1, 2, 3, 4, 5, 6, 8, 9, and 10 after the initial immunization for immune monitoring.

[0669] Results

[0670] Antigen-specific cellular immune responses in peripheral blood mononuclear cells (PBMCs) were measured to six different Mamu-A*01 restricted epitopes prior to immunization and 1, 2, 3, 4, 5, 6, 8, 9, and 10 weeks after the initial immunization. Animals received a boost immunization with VEE-MAG25mer srRNA on weeks 4 and 8 with either 30 μg or 100 μg doses, and either formulated with LNP1 or LNP2, as described in Table 22. Combined immune responses to all six epitopes were plotted for each immune monitoring timepoint (FIG. 15A-D and Tables 23-26).

[0671] Combined antigen-specific immune responses were observed at all measurements with 170, 14, 15, 11, 7, 8, 14, 17, 12 SFCs per 10⁶ PBMCs (six epitopes combined) 1, 2, 3, 4, 5, 6, 8, 9, or 10 weeks after an initial VEE-MAG25mer srRNA-LNP1 (30 μg) prime immunization, respectively (FIG. 15A). Combined antigen-specific immune responses were observed at all measurements with 108, −3, 14, 1, 37, 4, 105, 17, 25 SFCs per 10⁶ PBMCs (six epitopes combined) 1, 2, 3, 4, 5, 6, 8, 9, or 10 weeks after an initial VEE-MAG25mer srRNA-LNP1 (100 μg) prime immunization, respectively (FIG. 15B). Combined antigen-specific immune responses were observed at all measurements with −17, 38, 14, −2, 87, 21, 104, 129, 89 SFCs per 10⁶ PBMCs (six epitopes combined) 1, 2, 3, 4, 5, 6, 8, 9, or 10 weeks after an initial VEE-MAG25mer srRNA-LNP2 (100 μg) prime immunization, respectively (FIG. 15C). Negative values are a result of normalization to pre-bleed values for each epitope/animal.

[0672] Combined antigen-specific immune responses were observed at all measurements with 1218, 1784, 1866, 973, 1813, 747, 797, 1249, and 547 SFCs per 10⁶ PBMCs (six epitopes combined) 1, 2, 3, 4, 5, 6, 8, 9, or 10 weeks after an initial ChAdV68.5WTnt.MAG25mer prime immunization, respectively (FIG. 15D). The immune response showed the expected profile with peak immune responses measured ˜2-3 weeks after the prime immunization followed by a contraction in the immune response after 4 weeks. Combined antigen-specific cellular immune responses of 1813 SFCs per 10⁶ PBMCs (six epitopes combined) were measured 5 weeks after the initial immunization with ChAdV68.5WTnt.MAG25mer (i.e., 1 week after the first boost with VEE-MAG25mer srRNA). The immune response measured 1 week after the first boost with VEE-MAG25mer srRNA (week 5) was comparable to the peak immune response measured for the ChAdV68.5WTnt.MAG25mer prime immunization (week 3) (FIG. 15D). Combined antigen-specific cellular immune responses of 1249 SFCs per 10⁶ PBMCs (six epitopes combined) was measured 9 weeks after the initial immunization with ChAdV68.5WTnt.MAG25mer, respectively (i.e., 1 week after the second boost with VEE-MAG25mer srRNA). The immune responses measured 1 week after the second boost with VEE-MAG25mer srRNA (week 9) was ˜2-fold higher than that measured just before the boost immunization (FIG. 15D).

TABLE 23
Mean spot forming cells (SFC) per 10⁶ PBMCs for each epitope ± SEM
for VEE-MAG25mer srRNA-LNP1(30 μg) (Group 1)

| | Antigen | | | | | |
|---|---|---|---|---|---|---|
| Wk | Env CL9 | Env TL9 | Gag CM9 | Gag LW9 | Pol SV9 | Tat TL8 |
| 1 | 0 ± 0 | 0 ± 0 | 0 ± 0 | 0 ± 0 | 0 ± 0 | 0 ± 0 |
| 2 | 39.7 ± 22.7 | 35.4 ± 25.1 | 3.2 ± 3.6 | 33 ± 28.1 | 30.9 ± 20.3 | 28.3 ± 17.5 |
| 3 | 2 ± 2.4 | 0.2 ± 1.8 | 1.8 ± 2.4 | 3.7 ± 1.9 | 1.7 ± 2.8 | 4.9 ± 2.3 |
| 4 | 1 ± 1.8 | 0.3 ± 1.2 | 5.5 ± 3.6 | 2.3 ± 2.2 | 5.7 ± 2.7 | 0.8 ± 0.8 |
| 5 | 0.5 ± 0.9 | 1.4 ± 3.8 | 3.1 ± 1.6 | 2.3 ± 2.7 | 1.9 ± 2 | 1.4 ± 1.2 |
| 6 | 1.9 ± 1.8 | −0.3 ± 3 | 1.7 ± 1.2 | 1.4 ± 1.4 | 0.8 ± 1.1 | 1.1 ± 1 |
| 8 | −0.4 ± 0.8 | −0.9 ± 2.9 | 0.5 ± 1.3 | 3 ± 1.1 | 2.2 ± 2.1 | 3.7 ± 2 |
| 9 | 1 ± 1.7 | 1.2 ± 4.2 | 7.2 ± 3.9 | 0.5 ± 0.7 | 1.6 ± 3 | 3 ± 1 |
| 10 | 3.8 ± 1.8 | 11 ± 5 | −1.1 ± 1.1 | 1.9 ± 0.9 | 1.3 ± 1.6 | 0.2 ± 0.5 |

TABLE 24
Mean spot forming cells (SFC) per 10⁶ PBMCs for each epitope ± SEM
for VEE-MAG25mer srRNA-LNP1(100 μg) (Group 2)

| | Antigen | | | | | |
|---|---|---|---|---|---|---|
| Wk | Env CL9 | Env TL9 | Gag CM9 | Gag LW9 | Pol SV9 | Tat TL8 |
| 1 | 0 ± 0 | 0 ± 0 | 0 ± 0 | 0 ± 0 | 0 ± 0 | 0 ± 0 |
| 2 | 7.9 ± 17.2 | 23.2 ± 17.4 | 11.4 ± 4.9 | 41.7 ± 16.5 | 15 ± 13.5 | 8.9 ± 6.2 |
| 3 | −3.1 ± 4.6 | −7.2 ± 6.5 | 2.3 ± 2.3 | −0.3 ± 2.7 | 2.7 ± 5.1 | 2.2 ± 1.4 |
| 4 | 1.9 ± 3.8 | −6.2 ± 7.6 | 10.5 ± 4.1 | 1.2 ± 2.9 | 5.6 ± 4.9 | 1.1 ± 0.8 |
| 5 | −2.6 ± 7 | −8 ± 5.9 | 1.5 ± 1.7 | 6.4 ± 2.3 | 0.7 ± 4.3 | 3.3 ± 1.3 |
| 6 | 6.3 ± 6.3 | 4.4 ± 8.3 | 6.6 ± 4.4 | 5.2 ± 5.2 | 3.9 ± 5 | 10.8 ± 6.9 |
| 8 | −3.6 ± 7.2 | −6.8 ± 7.3 | −0.8 ± 1.2 | 3.4 ± 4.2 | 6.4 ± 7.5 | 5.7 ± 2.7 |
| 9 | 8.1 ± 2.4 | 20.6 ± 23.4 | 18.9 ± 5.7 | 8.1 ± 8.9 | 9 ± 11.2 | 40 ± 17.6 |
| 10 | 3.1 ± 8 | −3.9 ± 8.5 | 3.3 ± 1.8 | 0.6 ± 2.9 | 7.4 ± 6.4 | 6.1 ± 2.5 |

TABLE 25
Mean spot forming cells (SFC) per 10⁶ PBMCs for each epitope ± SEM
for VEE-MAG25mer srRNA-LNP2(100 μg) (Group 3)

| | Antigen | | | | | |
|---|---|---|---|---|---|---|
| Wk | Env CL9 | Env TL9 | Gag CM9 | Gag LW9 | Pol SV9 | Tat TL8 |
| 1 | 0 ± 0 | 0 ± 0 | 0 ± 0 | 0 ± 0 | 0 ± 0 | 0 ± 0 |
| 2 | −5.9 ± 3.8 | −0.3 ± 0.5 | −0.5 ± 1.5 | −5.7 ± 6.1 | −1 ± 1.3 | −3.2 ± 5.5 |
| 3 | 0.7 ± 5.2 | 3.4 ± 2.4 | 4.2 ± 4.6 | 18.3 ± 15.5 | 11.9 ± 5.1 | −0.4 ± 8.2 |
| 4 | −3.8 ± 5.5 | 2.3 ± 1.8 | 11.3 ± 6.1 | −3.1 ± 5.6 | 8.5 ± 4 | −1.5 ± 6.1 |
| 5 | −3.7 ± 5.7 | −0.1 ± 0.7 | −0.2 ± 1.6 | 3.4 ± 8.5 | 3 ± 3.1 | −4.6 ± 5 |
| 6 | 12.3 ± 15 | 7.8 ± 4.9 | 24.7 ± 19.8 | 23.2 ± 22.5 | 18.7 ± 15.8 | 0.5 ± 6.2 |
| 8 | 5.9 ± 12.3 | −0.1 ± 0.7 | −0.5 ± 1.3 | 8.8 ± 14.4 | 8.7 ± 8 | −1.3 ± 4 |
| 9 | 16.1 ± 13.4 | 16.5 ± 4 | 22.9 ± 4.2 | 13 ± 13.2 | 16.4 ± 7.8 | 19.6 ± 9.2 |
| 10 | 29.9 ± 21.8 | 22 ± 19.5 | 0.5 ± 2.6 | 22.2 ± 22.6 | 35.3 ± 15.8 | 19.4 ± 17.3 |

TABLE 26
Mean spot forming cells (SFC) per 10⁶ PBMCs for each epitope ± SEM for
ChAdV68.5WTnt.MAG25mer prime

| | Antigen | | | | | |
|---|---|---|---|---|---|---|
| Wk | Env CL9 | Env TL9 | Gag CM9 | Gag LW9 | Pol SV9 | Tat TL8 |
| 1 | 178 ± 68.7 | 206.5 ± 94.8 | 221.2 ± 120 | 15.4 ± 16.7 | 33.3 ± 25.9 | 563.5 ± 174.4 |
| 2 | 311.2 ± 165.5 | 278.8 ± 100.9 | 344.6 ± 110.8 | 46.3 ± 13.5 | 181.6 ± 76.8 | 621.4 ± 220.9 |
| 3 | 277.3 ± 101.1 | 359.6 ± 90.5 | 468.2 ± 106.6 | 41.7 ± 11.1 | 169.8 ± 57.8 | 549.4 ± 115.7 |
| 4 | 140 ± 46.5 | 169.6 ± 46.8 | 239.4 ± 37 | 26.5 ± 11.4 | 75 ± 31.6 | 322.2 ± 50.7 |
| 5 | 155.6 ± 62.1 | 406.7 ± 96.4 | 542.7 ± 143.3 | 35.1 ± 16.6 | 134.2 ± 53.7 | 538.5 ± 91.9 |
| 6 | 78.9 ± 42.5 | 95.5 ± 29.4 | 220.9 ± 75.3 | −1.4 ± 5.3 | 43.4 ± 19.6 | 308.1 ± 42.6 |
| 8 | 88.4 ± 30.4 | 162.1 ± 30.3 | 253.4 ± 78.6 | 21.4 ± 11.2 | 53.7 ± 22.3 | 217.8 ± 45.2 |
| 9 | 158.5 ± 69 | 322.3 ± 87.2 | 338.2 ± 137.1 | 5.6 ± 12.4 | 109.2 ± 17.9 | 314.8 ± 43.4 |
| 10 | 97.3 ± 32.5 | 133.2 ± 27 | 154.9 ± 59.2 | 10 ± 6 | 26 ± 16.7 | 125.5 ± 27.7 |

[0673] Non-GLP RNA Dose Ranging Study (Higher Doses) in Indian Rhesus Macaques

[0674] This study was designed to (a) evaluate the immunogenicity of VEE-MAG25mer srRNAat a dose of 300 μg as a homologous prime/boost or heterologous prime/boost in combination with ChAdV68.5WTnt.MAG25mer; (b) compare the immune responses of VEE-MAG25mer srRNA in lipid nanoparticles using LNP1 versus LNP2 at the 300 μg dose; and (c) evaluate the kinetics of T-cell responses to VEE-MAG25mer srRNA and ChAdV68.5WTnt.MAG25mer immunizations.

[0675] The study arm was conducted in Mamu-A*01 Indian rhesus macaques to demonstrate immunogenicity. Vaccine immunogenicity in nonhuman primate species, such as Rhesus, is the best predictor of vaccine potency in humans. Furthermore, select antigens used in this study are only recognized in Rhesus macaques, specifically those with a Mamu-A*01 MHC class I haplotype. Mamu-A*01 Indian rhesus macaques were randomized to the different study arms (6 macaques per group) and administered an IM injection bilaterally with either ChAdV68.5-WTnt.MAG25mer or VEE-MAG25mer srRNA encoding model antigens that includes multiple Mamu-A*01 restricted antigens. The study arms were as described below.

[0676] PBMCs were collected prior to immunization and 4, 5, 6, 7, 8, 10, 11, 12, 13, 14, 15, 16, 17, 18, 19, 20, 21, 22, 23 or 24 weeks after the initial immunization for immune monitoring for group 1 (heterologous prime/boost). PBMCs were collected prior to immunization and 4, 5, 7, 8, 10, 11, 12, 13, 14, or 15 weeks after the initial immunization for immune monitoring for groups 2 and 3 (homologous prime/boost).

TABLE 27
Non-GLP immunogenicity study in Indian Rhesus Macaques

| Group | Prime | Boost 1 | Boost 2 | Boost 3 |
|---|---|---|---|---|
| 1 | ChAdV68.5WTnt. | VEE-MAG25mer | VEE-MAG25mer | VEE-MAG25mer |
| | MAG25mer | srRNA-LNP2 | srRNA-LNP2 | srRNA-LNP2 |
| | | (300 μg) | (300 μg) | (300 μg) |
| 2 | VEE-MAG25mer | VEE-MAG25mer | VEE-MAG25mer | |
| | srRNA-LNP2 | srRNA-LNP2 | srRNA-LNP2 | |
| | (300 μg) | (300 μg) | (300 μg) | |
| 3 | VEE-MAG25mer | VEE-MAG25mer | VEE-MAG25mer | |
| | srRNA-LNP1 | srRNA-LNP1 | srRNA-LNP1 | |
| | (300 μg) | (300 μg) | (300 μg) | |

[0677] Results

[0678] Mamu-A*01 Indian rhesus macaques were immunized with ChAdV68.5-WTnt.MAG25mer. Antigen-specific cellular immune responses in peripheral blood mononuclear cells (PBMCs) were measured to six different Mamu-A*01 restricted epitopes prior to immunization and 4, 5, 6, 7, 8, 10, 11, 12, 13, 14, 15, 16, 17, 18, 19, 20, 21, 22, 23 or 24 weeks after the initial immunization (FIG. 16 and Table 28). Animals received boost immunizations with VEE-MAG25mer srRNA using the LNP2 formulation on weeks 4, 12, and 20. Combined antigen-specific immune responses of 1750, 4225, 1100, 2529, 3218, 1915, 1708, 1561, 5077, 4543, 4920, 5820, 3395, 2728, 1996, 1465, 4730, 2984, 2828, or 3043 SFCs per 10⁶ PBMCs (six epitopes combined) were measured 4, 5, 6, 7, 8, 10, 11, 12, 13, 14, 15, 16, 17, 18, 19, 20, 21, 22, 23 or 24 weeks after the initial immunization with ChAdV68.5WTnt.MAG25mer (FIG. 16). Immune responses measured 1 week after the second boost immunization (week 13) with VEE-MAG25mer srRNA were ˜3-fold higher than that measured just before the boost immunization (week 12). Immune responses measured 1 week after the third boost immunization (week 21) with VEE-MAG25mer srRNA, were ˜3-fold higher than that measured just before the boost immunization (week 20), similar to the response observed for the second boost.

[0679] Mamu-A*01 Indian rhesus macaques were also immunized with VEE-MAG25mer srRNA using two different LNP formulations (LNP1 and LNP2). Antigen-specific cellular immune responses in peripheral blood mononuclear cells (PBMCs) were measured to six different Mamu-A*01 restricted epitopes prior to immunization and 4, 5, 6, 7, 8, 10, 11, 12, 13, 14, or 15 weeks after the initial immunization (FIGS. 22 and 23, Tables 29 and 30). Animals received boost immunizations with VEE-MAG25mer srRNA using the respective LNP1 or LNP2 formulation on weeks 4 and 12. Combined antigen-specific immune responses of 168, 204, 103, 126, 140, 145, 330, 203, and 162 SFCs per 106 PBMCs (six epitopes combined) were measured 4, 5, 7, 8, 10, 11, 13, 14, 15 weeks after the immunization with VEE-MAG25mer srRNA-LNP2 (FIG. 17). Combined antigen-specific immune responses of 189, 185, 349, 437, 492, 570, 233, 886, 369, and 381 SFCs per 10⁶ PBMCs (six epitopes combined) were measured 4, 5, 7, 8, 10, 11, 12, 13, 14, 15 weeks after the immunization with VEE-MAG25mer srRNA-LNP1 (FIG. 18).

TABLE 28
Mean spot forming cells (SFC) per 10⁶ PBMCs for each epitope ± SEM for
priming vaccination with ChAdV68.5WTnt.MAG25mer (Group 1)

| | Antigen | | | | | |
|---|---|---|---|---|---|---|
| Wk | Env CL9 | Env TL9 | Gag CM9 | Gag LW9 | Pol SV9 | Tat TL8 |
| 4 | 173 ± 41.6 | 373.5 ± 87.3 | 461.4 ± 74.2 | 38.4 ± 26.1 | 94.5 ± 26 | 609.2 ± 121.9 |
| 5 | 412.7 ± 138.4 | 987.8 ± 283.3 | 1064.4 ± 266.9 | 85.6 ± 31.2 | 367.2 ± 135.2 | 1306.8 ± 332.8 |
| 6 | 116.2 ± 41.2 | 231.1 ± 46.3 | 268.3 ± 90.7 | 86.1 ± 42 | 174.3 ± 61 | 223.9 ± 38.1 |
| 7 | 287.4 ± 148.7 | 588.9 ± 173.9 | 693.2 ± 224.8 | 92.1 ± 33.5 | 172.9 ± 55.6 | 694.6 ± 194.8 |
| 8 | 325.4 ± 126.6 | 735.8 ± 212 | 948.9 ± 274.5 | 211.3 ± 62.7 | 179.1 ± 50 | 817.3 ± 185.2 |
| 10 | 312 ± 129.7 | 543.2 ± 188.4 | 618.6 ± 221.7 | −5.7 ± 4.1 | 136.5 ± 51.3 | 309.9 ± 85.6 |
| 11 | 248.5 ± 81.1 | 348.7 ± 129.8 | 581.1 ± 205.5 | −3.1 ± 4.4 | 119 ± 51.2 | 413.7 ± 144.8 |
| 12 | 261.9 ± 68.2 | 329.9 ± 83 | 486.5 ± 118.6 | −1.2 ± 5.1 | 132.8 ± 31.8 | 350.9 ± 69.3 |
| 13 | 389.3 ± 167.7 | 1615.8 ± 418.3 | 1244.3 ± 403.6 | 1.3 ± 8.1 | 522.5 ± 155 | 1303.3 ± 385.6 |
| 14 | 406.3 ± 121.6 | 1616 ± 491.7 | 1142.3 ± 247.2 | 6.6 ± 11.1 | 322.7 ± 94.1 | 1048.6 ± 215.6 |
| 15 | 446.8 ± 138.7 | 1700.8 ± 469.1 | 1306.3 ± 294.4 | 43 ± 24.5 | 421.2 ± 87.9 | 1001.5 ± 236.4 |
| 16 | 686.8 ± 268.8 | 1979.5 ± 541.7 | 1616.8 ± 411.8 | 2.4 ± 7.8 | 381.9 ± 116.4 | 1152.8 ± 352.7 |
| 17 | 375.8 ± 109.3 | 1378.6 ± 561.2 | 773.1 ± 210.3 | −1.4 ± 4.3 | 177.6 ± 93.7 | 691.7 ± 245 |
| 18 | 255.9 ± 99.7 | 1538.4 ± 498.1 | 498.7 ± 152.3 | −5.3 ± 3.3 | 26.2 ± 13.4 | 413.9 ± 164.8 |
| 19 | 133 ± 62.6 | 955.9 ± 456.8 | 491.1 ± 121.8 | −5.7 ± 4.1 | 50.3 ± 25.4 | 371.2 ± 123.7 |
| 20 | 163.7 ± 55.8 | 641.7 ± 313.5 | 357.9 ± 91.1 | 2.6 ± 7.5 | 41.4 ± 24.2 | 257.8 ± 68.9 |
| 21 | 319.9 ± 160.5 | 2017.1 ± 419.9 | 1204.8 ± 335.2 | −3.7 ± 5.1 | 268.1 ± 109.6 | 924.1 ± 301 |
| 22 | 244.7 ± 105.6 | 1370.9 ± 563.5 | 780.3 ± 390 | −3.6 ± 5.1 | 118.2 ± 68.1 | 473.3 ± 249.3 |
| 23 | 176.7 ± 81.8 | 1263.7 ± 527.3 | 838.6 ± 367.9 | −5.7 ± 4.1 | 73.6 ± 49 | 480.9 ± 163.9 |
| 24 | 236.5 ± 92 | 1324.7 ± 589.3 | 879.7 ± 321 | −0.4 ± 5.7 | 104 ± 53.1 | 498 ± 135.8 |

TABLE 29
Mean spot forming cells (SFC) per 10⁶ PBMCs for each epitope ± SEM for
priming vaccination with VEE-MAG25mer srRNA-LNP2 (300 μg) (Group 2)

| | Antigen | | | | | |
|---|---|---|---|---|---|---|
| Wk | Env CL9 | Env TL9 | Gag CM9 | Gag LW9 | Pol SV9 | Tat TL8 |
| 4 | 46 ± 27.1 | 18.4 ± 6.8 | 58.3 ± 45.8 | 29.9 ± 20.8 | 4.9 ± 2.3 | 10.7 ± 4 |
| 5 | 85.4 ± 54 | 5.2 ± 5.8 | 52.4 ± 51.2 | 34.5 ± 35 | 11.8 ± 12.2 | 14.4 ± 7.9 |
| 7 | 18.6 ± 32.5 | 1.9 ± 1.7 | 59.4 ± 55.7 | 9.3 ± 10.7 | 3.3 ± 3 | 10.7 ± 6.1 |
| 8 | 36.6 ± 39.4 | 6.3 ± 3.9 | 48.7 ± 39.9 | 13.5 ± 8.8 | 3.8 ± 3.6 | 17.2 ± 9.7 |
| 10 | 69.1 ± 59.1 | 4.4 ± 1.9 | 39.3 ± 38 | 14.7 ± 10.8 | 4.4 ± 5.3 | 8.5 ± 5.3 |
| 11 | 43 ± 38.8 | 22.6 ± 21.1 | 30.2 ± 26.2 | 3.3 ± 2.2 | 5.8 ± 3.5 | 40.3 ± 25.5 |
| 13 | 120.4 ± 78.3 | 68.2 ± 43.9 | 54.2 ± 36.8 | 21.8 ± 7.4 | 17.7 ± 6.1 | 47.4 ± 27.3 |
| 14 | 76 ± 44.8 | 28 ± 19.5 | 65.9 ± 64.3 | −0.3 ± 1.3 | 2.5 ± 2 | 31.1 ± 26.5 |
| 15 | 58.9 ± 41.4 | 19.5 ± 15.1 | 55.4 ± 51 | 2.5 ± 2 | 5.5 ± 3.6 | 20.1 ± 15.7 |

TABLE 30
Mean spot forming cells (SFC) per 10⁶ PBMCs for each epitope ± SEM for
priming vaccination with VEE-MAG25mer srRNA-LNP1 (300 μg) (Group 3)

| | Antigen | | | | | |
|---|---|---|---|---|---|---|
| Wk | Env CL9 | Env TL9 | Gag CM9 | Gag LW9 | Pol SV9 | Tat TL8 |
| 4 | 19.5 ± 8.7 | 13.3 ± 13.1 | 16.5 ± 15.3 | 10.5 ± 7.3 | 35.9 ± 24.8 | 92.9 ± 91.6 |
| 5 | 87.9 ± 43.9 | 12.7 ± 11.7 | 37.2 ± 31.9 | 21.1 ± 23.8 | 13.2 ± 13.7 | 12.6 ± 13.7 |
| 7 | 21.1 ± 13.3 | 48.8 ± 48.4 | 51.7 ± 39.5 | 9.1 ± 10.5 | 58.6 ± 55.8 | 159.4 ± 159 |
| 8 | 47.7 ± 21.7 | 66.4 ± 52.2 | 59.8 ± 57.4 | 49.4 ± 28 | 79.4 ± 63 | 133.8 ± 132.1 |
| 10 | 49 ± 30.2 | 42.2 ± 41.1 | 139.3 ± 139.3 | 51.6 ± 51.2 | 78.2 ± 75.8 | 131.7 ± 131.6 |
| 11 | 42 ± 26.8 | 20.9 ± 21.4 | 177.1 ± 162 | −6.3 ± 4.3 | 104.3 ± 104.1 | 231.5 ± 230.1 |
| 12 | 40.2 ± 19 | 20.3 ± 11.9 | 42.2 ± 46.7 | 3.7 ± 6.7 | 57 ± 44.7 | 70 ± 69.2 |
| 13 | 81.2 ± 48.9 | 38.2 ± 37.6 | 259.4 ± 222.2 | −4 ± 4.1 | 164.1 ± 159.3 | 347.3 ± 343.5 |
| 14 | 34.5 ± 31.8 | 5.3 ± 11.6 | 138.6 ± 137.3 | −4.7 ± 5.2 | 52.3 ± 52.9 | 142.6 ± 142.6 |
| 15 | 49 ± 24 | 6.7 ± 9.8 | 167.1 ± 163.8 | −6.4 ± 4.2 | 47.8 ± 42.3 | 116.6 ± 114.5 |

[0680] srRNA Dose Ranging Study

[0681] In one implementation of the present invention, an srRNA dose ranging study can be conducted in mamu A01 Indian rhesus macaques to identify which srRNA dose to progress to NHP immunogenicity studies. In one example, Mamu A01 Indian rhesus macaques can be administered with an srRNA vector encoding model antigens that includes multiple mamu A01 restricted epitopes by IM injection. In another example, an anti-CTLA-4 monoclonal antibody can be administered SC proximal to the site of IM vaccine injection to target the vaccine draining lymph node in one group of animals. PBMCs can be collected every 2 weeks after the initial vaccination for immune monitoring. The study arms are described in below (Table 31).

TABLE 31
Non-GLP RNA dose ranging study in Indian Rhesus Macaques

| Group | Prime | Boost 1 | Boost 2 |
|---|---|---|---|
| 1 | srRNA-LNP | srRNA-LNP | srRNA-LNP |
| | (Low Dose) | (Low Dose) | (Low Dose) |
| 2 | srRNA-LNP | srRNA-LNP | srRNA-LNP |
| | (Mid Dose) | (Mid Dose) | (Mid Dose) |
| 3 | srRNA-LNP | srRNA-LNP | srRNA-LNP |
| | (High Dose) | (High Dose) | (High Dose) |
| 4 | srRNA-LNP | srRNA-LNP | srRNA-LNP |
| | (High Dose) + | (High Dose) + | (High Dose) + |
| | anti-CTLA-4 | anti-CTLA-4 | anti-CTLA-4 |

* Dose range of srRNA to be determined with the high dose ≤ 300 μg.

[0682] Immunogenicity Study in Indian Rhesus Macaques

[0683] Vaccine studies were conducted in mamu A01 Indian rhesus macaques (NHPs) to demonstrate immunogenicity using the antigen vectors. FIG. 26 illustrates the vaccination strategy. Three groups of NHPs were immunized with ChAdV68.5-WTnt.MAG25mer and either with the checkpoint inhibitor anti-CTLA-4 antibody Ipilimumab (Groups 5 & 6) or without the checkpoint inhibitor (Group 4). The antibody was administered either intravenously (group 5) or subcutaneously (group 6). Triangles indicate chAd68 vaccination (1e12 vp/animal) at weeks 0 & 32. Circles represent alphavirus vaccination at weeks 0, 4, 12, 20, 28 and 32.

[0684] The time course of CD8+ anti-epitope responses in the immunized NHPs are presented for chAd-MAG immunization alone (FIG. 27 and Table 32A), chAd-MAG immunization with the checkpoint inhibitor delivered IV (FIG. 28 and Table 32B), and chAd-MAG immunization with the checkpoint inhibitor delivered SC (FIG. 29 and Table 32C). The results demonstrate chAd68 vectors efficiently primed CD8+ responses in primates, alphavirus vectors efficiently boosted the chAD68 vaccine priming response, checkpoint inhibitor whether delivered IV or SC amplified both priming and boosting responses, and chAd vectors readministered post vaccination to effectively boosted the immune responses.

TABLE 32A
CD8+ anti-epitope responses in Rhesus Macaques dosed with chAd-MAG
(Group 4). Mean SFC/1e6 splenocytes +/− the standard error is shown

| | Antigen | | | | | |
|---|---|---|---|---|---|---|
| Wk | Env CL9 | Env TL9 | Gag CM9 | Gag LW9 | Pol SV9 | Tat TL8 |
| 4 | 173 ± 41.6 | 373.5 ± 87.3 | 461.4 ± 74.2 | 38.4 ± 26.1 | 94.5 ± 26 | 609.2 ± 121.9 |
| 5 | 412.7 ± 138.4 | 987.8 ± 283.3 | 1064.4 ± 266.9 | 85.6 ± 31.2 | 367.2 ± 135.2 | 1306.8 ± 332.8 |
| 6 | 116.2 ± 41.2 | 231.1 ± 46.3 | 268.3 ± 90.7 | 86.1 ± 42 | 174.3 ± 61 | 223.9 ± 38.1 |
| 7 | 287.4 ± 148.7 | 588.9 ± 173.9 | 693.2 ± 224.8 | 92.1 ± 33.5 | 172.9 ± 55.6 | 694.6 ± 194.8 |
| 8 | 325.4 ± 126.6 | 735.8 ± 212 | 948.9 ± 274.5 | 211.3 ± 62.7 | 179.1 ± 50 | 817.3 ± 185.2 |
| 10 | 312 ± 129.7 | 543.2 ± 188.4 | 618.6 ± 221.7 | −5.7 ± 4.1 | 136.5 ± 51.3 | 309.9 ± 85.6 |
| 11 | 248.5 ± 81.1 | 348.7 ± 129.8 | 581.1 ± 205.5 | −3.1 ± 4.4 | 119 ± 51.2 | 413.7 ± 144.8 |
| 12 | 261.9 ± 68.2 | 329.9 ± 83 | 486.5 ± 118.6 | −1.2 ± 5.1 | 132.8 ± 31.8 | 350.9 ± 69.3 |
| 13 | 389.3 ± 167.7 | 1615.8 ± 418.3 | 1244.3 ± 403.6 | 1.3 ± 8.1 | 522.5 ± 155 | 1303.3 ± 385.6 |
| 14 | 406.3 ± 121.6 | 1616 ± 491.7 | 1142.3 ± 247.2 | 6.6 ± 11.1 | 322.7 ± 94.1 | 1048.6 ± 215.6 |
| 15 | 446.8 ± 138.7 | 1700.8 ± 469.1 | 1306.3 ± 294.4 | 43 ± 24.5 | 421.2 ± 87.9 | 1001.5 ± 236.4 |
| 16 | 686.8 ± 268.8 | 1979.5 ± 541.7 | 1616.8 ± 411.8 | 2.4 ± 7.8 | 381.9 ± 116.4 | 1152.8 ± 352.7 |
| 17 | 375.8 ± 109.3 | 1378.6 ± 561.2 | 773.1 ± 210.3 | −1.4 ± 4.3 | 177.6 ± 93.7 | 691.7 ± 245 |
| 18 | 255.9 ± 99.7 | 1538.4 ± 498.1 | 498.7 ± 152.3 | −5.3 ± 3.3 | 26.2 ± 13.4 | 413.9 ± 164.8 |
| 19 | 133 ± 62.6 | 955.9 ± 456.8 | 491.1 ± 121.8 | −5.7 ± 4.1 | 50.3 ± 25.4 | 371.2 ± 123.7 |
| 20 | 163.7 ± 55.8 | 641.7 ± 313.5 | 357.9 ± 91.1 | 2.6 ± 7.5 | 41.4 ± 24.2 | 257.8 ± 68.9 |
| 21 | 319.9 ± 160.5 | 2017.1 ± 419.9 | 1204.8 ± 335.2 | −3.7 ± 5.1 | 268.1 ± 109.6 | 924.1 ± 301 |
| 22 | 244.7 ± 105.6 | 1370.9 ± 563.5 | 780.3 ± 390 | −3.6 ± 5.1 | 118.2 ± 68.1 | 473.3 ± 249.3 |
| 23 | 176.7 ± 81.8 | 1263.7 ± 527.3 | 838.6 ± 367.9 | −5.7 ± 4.1 | 73.6 ± 49 | 480.9 ± 163.9 |
| 24 | 236.5 ± 92 | 1324.7 ± 589.3 | 879.7 ± 321 | −0.4 ± 5.7 | 104 ± 53.1 | 498 ± 135.8 |
| 25 | 136.4 ± 52.6 | 1207.1 ± 501.6 | 924 ± 358.5 | 6.2 ± 10.5 | 74.1 ± 34.4 | 484.6 ± 116.7 |
| 26 | 278.2 ± 114.4 | 1645 ± 661.7 | 1170.2 ± 469.9 | −2.9 ± 5.7 | 80.6 ± 55.8 | 784.4 ± 214.1 |
| 27 | 159 ± 56.8 | 961.7 ± 547.1 | 783.6 ± 366.4 | −5 ± 4.3 | 63.6 ± 27.5 | 402.9 ± 123.4 |
| 28 | 189.6 ± 75.7 | 1073.1 ± 508.8 | 668.3 ± 312.5 | −5.7 ± 4.1 | 80.3 ± 38.3 | 386.4 ± 122 |
| 29 | 155.3 ± 69.1 | 1102.9 ± 606.1 | 632.9 ± 235 | 34.5 ± 24.2 | 80 ± 35.5 | 422.5 ± 122.9 |
| 30 | 160.2 ± 59.9 | 859 ± 440.9 | 455 ± 209.1 | −3 ± 5.3 | 60.5 ± 28.4 | 302.7 ± 123.2 |
| 31 | 122.2 ± 49.7 | 771.1 ± 392.7 | 582.2 ± 233.5 | −5.7 ± 4.1 | 55.1 ± 27.3 | 295.2 ± 68.3 |
| 32 | 119.3 ± 28.3 | 619.4 ± 189.7 | 566 ± 222.1 | −3.7 ± 5.1 | 21.9 ± 4.5 | 320.5 ± 76.4 |
| 33 | 380.5 ± 122 | 1636.1 ± 391.4 | 1056.2 ± 205.7 | −5.7 ± 4.1 | 154.5 ± 38.5 | 988.4 ± 287.7 |
| 34 | 1410.8 ± 505.4 | 972.4 ± 301.5 | 319.6 ± 89.6 | −4.8 ± 4.2 | 141.1 ± 49.8 | 1375.5 ± 296.7 |
| 37 | 130.8 ± 29.2 | 500 ± 156.9 | 424.9 ± 148.9 | −3.5 ± 4.7 | 77.7 ± 24.6 | 207.1 ± 42.4 |
| 38 | 167.7 ± 54.8 | 1390.8 ± 504.7 | 830.4 ± 329.1 | −5.5 ± 4.1 | 111.8 ± 43.2 | 516 ± 121.7 |

TABLE 32B
CD8+ anti-epitope responses in Rhesus Macaques dosed with chAd-MAG plus
anti-CTLA4 antibody (Ipilimumab) delivered IV. (Group 5). Mean SFC/1e6 splenocytes +/−
the standard error is shown

| | Antigen | | | | | |
|---|---|---|---|---|---|---|
| Wk | Env CL9 | Env TL9 | Gag CM9 | Gag LW9 | Pol SV9 | Tat TL8 |
| 4 | 1848.1 ± 432.2 | 1295.7 ± 479.7 | 1709.8 ± 416.9 | 513.7 ± 219.8 | 838.5 ± 221.1 | 2514.6 ± 246.5 |
| 5 | 1844.1 ± 410.2 | 2367.5 ± 334.4 | 1983.1 ± 370.7 | 732.1 ± 249.4 | 1429.7 ± 275.3 | 2517.7 ± 286.5 |
| 6 | 822.4 ± 216.7 | 1131.2 ± 194.7 | 796.8 ± 185.8 | 226.8 ± 70 | 802.2 ± 101.4 | 913.5 ± 222.7 |
| 7 | 1147.2 ± 332.9 | 1066 ± 311.2 | 1149.8 ± 467.3 | 267.4 ± 162.6 | 621.5 ± 283.2 | 1552.2 ± 395.1 |
| 8 | 1192.7 ± 188.8 | 1461.5 ± 237.7 | 1566.9 ± 310.5 | 522.5 ± 118.6 | 662.3 ± 142.4 | 1706 ± 216.7 |
| 10 | 1249 ± 220.3 | 1170.6 ± 227.7 | 1297.3 ± 264.7 | −0.3 ± 4.4 | 551.8 ± 90.5 | 1425.3 ± 142.6 |
| 11 | 934.2 ± 221.7 | 808 ± 191.3 | 1003.1 ± 293.4 | 1.9 ± 4.3 | 364.2 ± 76.6 | 1270.8 ± 191.6 |
| 12 | 1106.2 ± 216.6 | 896.7 ± 190.7 | 1020.1 ± 243.3 | 1.3 ± 3.9 | 436.6 ± 90 | 1222 ± 155.4 |
| 13 | 2023.8 ± 556.3 | 3696.7 ± 1.7 | 2248.5 ± 436.4 | −4.5 ± 3.5 | 2614 ± 406.1 | 3700 ± 0 |
| 14 | 1278.7 ± 240 | 2639.5 ± 387 | 1654.6 ± 381.1 | −6 ± 2.1 | 988.8 ± 197.9 | 2288.3 ± 298.7 |
| 15 | 1458.9 ± 281.8 | 2932.5 ± 488.7 | 1893.4 ± 499 | 74.6 ± 15.6 | 1657.8 ± 508.9 | 2709.1 ± 428.7 |
| 16 | 1556.8 ± 243 | 2143.8 ± 295.2 | 2082.8 ± 234.2 | −5.8 ± 2.5 | 1014.6 ± 161.4 | 2063.7 ± 86.7 |
| 17 | 1527 ± 495.1 | 2213 ± 677.1 | 1767.7 ± 391.8 | 15.1 ± 5.9 | 633.8 ± 133.9 | 2890.8 ± 433.9 |
| 18 | 1068.2 ± 279.9 | 1940.9 ± 204.1 | 1114.1 ± 216.1 | −5.8 ± 2.5 | 396.6 ± 77.6 | 1659.4 ± 171.7 |
| 19 | 760.7 ± 362.2 | 1099.5 ± 438.4 | 802.7 ± 192.5 | −2.4 ± 3.3 | 262.2 ± 62.2 | 1118.6 ± 224.2 |
| 20 | 696.3 ± 138.2 | 954.9 ± 198 | 765.1 ± 248.4 | −1.4 ± 4.4 | 279.6 ± 89.3 | 1139 ± 204.5 |
| 21 | 1201.4 ± 327.9 | 3096 ± 1.9 | 1901 ± 412.1 | −5.8 ± 2.5 | 1676.3 ± 311.5 | 2809.3 ± 195.8 |
| 22 | 1442.5 ± 508.3 | 2944.7 ± 438.6 | 1528.4 ± 349.6 | 2.8 ± 5.1 | 940.7 ± 160.5 | 2306.3 ± 218.6 |
| 23 | 1400.4 ± 502.2 | 2757.1 ± 452.9 | 1604.2 ± 450.1 | −5.1 ± 2.3 | 708.1 ± 162.6 | 2100.4 ± 362.9 |
| 24 | 1351 ± 585.1 | 2264.5 ± 496 | 1080.6 ± 253.8 | 0.3 ± 6.5 | 444.2 ± 126.4 | 1823.7 ± 306.5 |
| 25 | 1211.5 ± 505.2 | 2160.4 ± 581.8 | 970.8 ± 235.9 | 2.5 ± 3.8 | 450.4 ± 126.9 | 1626.2 ± 261.3 |
| 26 | 1443 ± 492.5 | 2485 ± 588 | 1252.5 ± 326.4 | −0.2 ± 6 | 360.2 ± 92.3 | 2081.9 ± 331.1 |
| 27 | 896.2 ± 413.3 | 1686 ± 559.5 | 751 ± 192.1 | −3.7 ± 2.5 | 247.4 ± 82.8 | 1364.1 ± 232 |
| 28 | 1147.8 ± 456.9 | 1912.1 ± 417.1 | 930.3 ± 211.4 | −5.8 ± 2.5 | 423.9 ± 79.6 | 1649.3 ± 315 |
| 29 | 1038.5 ± 431.9 | 1915.2 ± 626.1 | 786.8 ± 205.9 | 23.5 ± 8.3 | 462.8 ± 64 | 1441.5 ± 249.7 |
| 30 | 730.5 ± 259.3 | 1078.6 ± 211.5 | 699.1 ± 156.2 | −4.4 ± 2.7 | 234.4 ± 43.9 | 1160.6 ± 112.6 |
| 31 | 750.4 ± 328.3 | 1431 ± 549.9 | 650.6 ± 141.1 | −5.2 ± 3 | 243.4 ± 56.4 | 868.9 ± 142.8 |
| 32 | 581.4 ± 227.7 | 1326.6 ± 505.2 | 573.3 ± 138 | −3.2 ± 4.2 | 160.8 ± 49.2 | 936.4 ± 110.4 |
| 33 | 2198.4 ± 403.8 | 3093.4 ± 123.3 | 2391.8 ± 378.4 | 7.1 ± 8.5 | 1598.1 ± 343.1 | 2827.5 ± 289.5 |
| 34 | 2654.3 ± 337 | 2709.9 ± 204.3 | 1297.5 ± 291.4 | 0.4 ± 4.2 | 1091.8 ± 242.9 | 1924 ± 245.7 |
| 37 | 846.8 ± 301.7 | 1706.9 ± 196 | 973.6 ± 149.3 | 50.5 ± 45.2 | 777.3 ± 140.2 | 1478.8 ± 94.3 |

TABLE 32C
CD8+ anti-epitope responses in Rhesus Macaques dosed with chAd-MAG plus
anti-CTLA4 antibody (Ipilimumab) delivered SC (Group 6). Mean SFC/1e6 splenocytes +/−
the standard error is shown

| | Antigen | | | | | |
|---|---|---|---|---|---|---|
| Wk | Env CL9 | Env TL9 | Gag CM9 | Gag LW9 | Pol SV9 | Tat TL8 |
| 4 | 598.3 ± 157.4 | 923.7 ± 306.8 | 1075.6 ± 171.8 | 180.5 ± 74.1 | 752.3 ± 245.8 | 1955.3 ± 444.4 |
| 5 | 842.2 ± 188.5 | 1703.7 ± 514.2 | 1595.8 ± 348.4 | 352.7 ± 92.3 | 1598.9 ± 416.8 | 2163.7 ± 522.1 |
| 6 | 396.4 ± 45.3 | 728.3 ± 232.7 | 503.8 ± 151.9 | 282 ± 69 | 463.1 ± 135.7 | 555.2 ± 191.5 |
| 7 | 584.2 ± 177 | 838.3 ± 254.9 | 1013.9 ± 349.4 | 173.6 ± 64.3 | 507.4 ± 165.7 | 1222.8 ± 368 |
| 8 | 642.9 ± 134 | 1128.6 ± 240.6 | 1259.1 ± 163.8 | 366.1 ± 72.8 | 726.7 ± 220.9 | 1695.6 ± 359.4 |
| 10 | 660.4 ± 211.4 | 746.9 ± 222.7 | 944.8 ± 210.2 | −1.2 ± 1.9 | 523.4 ± 230.7 | 787.3 ± 308.3 |
| 11 | 571.2 ± 162 | 609.4 ± 194.3 | 937.9 ± 186.5 | −8.9 ± 2.3 | 511.6 ± 229.6 | 1033.3 ± 315.7 |
| 12 | 485.3 ± 123.7 | 489.4 ± 142.7 | 919.3 ± 214.1 | −8.9 ± 2.3 | 341.6 ± 139.4 | 1394.7 ± 432.1 |
| 13 | 986.9 ± 154.5 | 2811.9 ± 411.3 | 1687.7 ± 344.3 | −4.1 ± 5.1 | 1368.5 ± 294.2 | 2751 ± 501.9 |
| 14 | 945.9 ± 251.4 | 2027.7 ± 492.8 | 1386.7 ± 326.7 | −5.7 ± 2.8 | 708.9 ± 277.1 | 1588.2 ± 440.1 |
| 15 | 1075.2 ± 322.4 | 2386 ± 580.7 | 1606.3 ± 368.1 | −5.4 ± 3.2 | 763.3 ± 248.8 | 1896.5 ± 507.8 |
| 16 | 1171.8 ± 341.6 | 2255.1 ± 439.6 | 1672.2 ± 342.3 | −7.8 ± 2.4 | 1031.6 ± 228.8 | 1896.4 ± 419.9 |
| 17 | 1118.2 ± 415.4 | 2156.3 ± 476 | 1345.3 ± 377.7 | −1.1 ± 6.7 | 573.7 ± 118.8 | 1614.4 ± 382.3 |
| 18 | 861.3 ± 313.8 | 2668.2 ± 366.8 | 1157.2 ± 259.6 | −8.9 ± 2.3 | 481.2 ± 164 | 1725.8 ± 511.4 |
| 19 | 719.2 ± 294.2 | 1447.2 ± 285 | 968 ± 294.5 | −2.2 ± 4.6 | 395.6 ± 106.1 | 1199.6 ± 289.2 |
| 20 | 651.6 ± 184 | 1189.8 ± 242.8 | 947.4 ± 249.8 | −8.9 ± 2.3 | 355 ± 106.3 | 1234.7 ± 361.7 |
| 21 | 810.3 ± 301.9 | 2576.2 ± 283.7 | 1334 ± 363.1 | −8.9 ± 2.3 | 892.2 ± 305 | 1904.4 ± 448.1 |
| 22 | 775 ± 196.4 | 2949 ± 409.7 | 1421.8 ± 309.7 | 38 ± 27.8 | 577 ± 144.2 | 2330.6 ± 572.3 |
| 23 | 584.9 ± 240.2 | 1977.9 ± 361.4 | 1209.8 ± 405.1 | −7.3 ± 3.2 | 273.7 ± 93.3 | 1430.6 ± 363.9 |
| 24 | 485.4 ± 194.4 | 1819.8 ± 325.5 | 837.2 ± 261.4 | −3.4 ± 4.1 | 234.4 ± 71.1 | 943.9 ± 243.3 |
| 25 | 452.3 ± 175 | 2072 ± 405.7 | 957.1 ± 293.1 | −8.9 ± 2.3 | 163 ± 43.2 | 1341.2 ± 394.7 |
| 26 | 517.9 ± 179.1 | 2616 ± 567.5 | 1126.6 ± 289 | −8.3 ± 2.3 | 199.9 ± 89.2 | 1615.7 ± 385.6 |
| 27 | 592.8 ± 171.7 | 1838.3 ± 372.4 | 749.3 ± 170.4 | −7.3 ± 2.5 | 325.5 ± 98.7 | 1110.7 ± 308.8 |
| 28 | 793 ± 228.5 | 1795.4 ± 332.3 | 1068.7 ± 210.3 | 2.5 ± 4.1 | 553.1 ± 144.3 | 1480.8 ± 357.1 |
| 29 | 661.8 ± 199.9 | 2140.6 ± 599.3 | 1202.7 ± 292.2 | −8.7 ± 2.8 | 558.9 ± 279.2 | 1424.2 ± 408.6 |
| 30 | 529.1 ± 163.3 | 1528.2 ± 249.8 | 840.5 ± 218.3 | −8.9 ± 2.3 | 357.7 ± 149.4 | 1029.3 ± 335 |
| 31 | 464.8 ± 152.9 | 1332.2 ± 322.7 | 726.3 ± 194.3 | −8.9 ± 2.3 | 354.3 ± 158.6 | 884.4 ± 282 |
| 32 | 612.9 ± 175.3 | 1584.2 ± 390.2 | 1058.3 ± 219.8 | −8.7 ± 2.8 | 364.6 ± 149.8 | 1388.8 ± 467.3 |
| 33 | 1600.2 ± 416.7 | 2597.4 ± 367.9 | 2086.4 ± 414.8 | −6.3 ± 3.3 | 893.8 ± 266 | 2490.6 ± 416.4 |
| 34 | 2814.6 ± 376.2 | 2713.6 ± 380.8 | 1888.8 ± 499.4 | −7.5 ± 3.1 | 1288.9 ± 438.9 | 2428.1 ± 458.9 |
| 37 | 1245.9 ± 471.7 | 1877.7 ± 291.2 | 1606.6 ± 441.9 | 14.2 ± 13 | 1227.5 ± 348.1 | 1260.7 ± 342 |

[0685] Memory Phenotyping in Indian Rhesus Macaques

[0686] Rhesus macaque were immunized with ChAdV68.5WTnt.MAG25mer/VEE-MAG25mer srRNA heterologous prime/boost regimen with or without anti-CTLA4, and boosted again with ChAdV68.5WTnt.MAG25mer. Groups were assessed 11 months after the final ChAdV68 administration (study month 18). by ELISpot was performed as described. FIG. 30 and Table 33 shows cellular responses to six different Mamu-A*01 restricted epitopes as measured by ELISpot both pre-immunization (left panel) and after 18 months (right panel). The detection of responses to the restricted epitopes demonstrates antigen-specific memory responses were generated by ChAdV68/samRNA vaccine protocol.

[0687] To assess memory, CD8+ T-cells recognizing 4 different rhesus macaque Mamu-A*01 class I epitopes encoded in the vaccines were monitored using dual-color Mamu-A*01 tetramer labeling, with each antigen being represented by a unique double positive combination, and allowed the identification of all 4 antigen-specific populations within a single sample. Memory cell phenotyping was performed by co-staining with the cell surface markers CD45RA and CCR7. FIG. 31 and Table 34 shows the results of the combinatorial tetramer staining and CD45RA/CCR7 co-staining for memory T-cells recognizing four different Mamu-A*01 restricted epitopes. The T cell phenotypes were also assessed by flow cytometry. FIG. 32 shows the distribution of memory cell types within the sum of the four Mamu-A*01 tetramer+ CD8+ T-cell populations at study month 18. Memory cells were characterized as follows: CD45RA+CCR7+=naïve, CD45RA+CCR7−=effector (Teff), CD45RA−CCR7+=central memory (Tcm), CD45RA−CCR7−=effector memory (Tem). Collectively, the results demonstrate that memory responses were detected at least one year following the last boost indicating long lasting immunity, including effector, central memory, and effector memory populations.

TABLE 33
Mean spot forming cells (SFC) per 10⁶ PBMCs for each animal at both pre-prime
and memory assessment time points (18 months).

| | Pre-prime baseline | | | | | | 18 months | | | | | |
|---|---|---|---|---|---|---|---|---|---|---|---|---|
| | Tat | Gag | Env | Env | Gag | Pol | Tat | Gag | Env | Env | Gag | Pol |
| Animal | TL8 | CM9 | TL9 | CL9 | LW9 | SV9 | TL8 | CM9 | TL9 | CL9 | LW9 | SV9 |
| 1 | 1.7 | 0.0 | 0.0 | 5.0 | 0.0 | 13.7 | 683.0 | 499.2 | 1100.3 | 217.5 | 47.7 | 205.3 |
| 2 | 0.0 | 0.0 | 0.0 | 0.2 | 0.1 | 0.0 | 773.4 | ND | 1500.0 | 509.3 | 134.5 | 242.5 |
| 3 | 0.0 | 0.0 | 6.7 | 6.8 | 10.2 | 3.3 | 746.3 | 167.5 | 494.1 | 402.8 | 140.6 | 376.0 |
| 4 | 0.0 | 0.0 | 0.0 | 0.0 | 0.0 | 0.0 | 47.6 | 1023.9 | 85.1 | 44.2 | 44.2 | 47.6 |
| 5 | 15.3 | 6.7 | 18.6 | 15.6 | 5.2 | 12.1 | 842.4 | 467.7 | 1500.0 | 805.9 | 527.8 | 201.8 |
| 6 | 3.1 | 0.0 | 0.0 | 15.5 | 6.9 | 5.3 | 224.3 | 720.3 | 849.0 | 296.9 | 32.4 | 121.9 |

ND = not determined due to technical exclusion

TABLE 34
Percent Mamu-A*01 tetramer positive out of live CD8+ cells

| Animal | Tat TL8 | Gag CM9 | Env TL9 | Env CL9 |
|---|---|---|---|---|
| 1 | 0.42 | 0.11 | 0.19 | 0.013 |
| 2 | 0.36 | 0.048 | 0.033 | 0.00834 |
| 3 | 0.97 | 0.051 | 0.35 | 0.048 |
| 4 | 0.46 | 0.083 | 0.17 | 0.028 |
| 5 | 0.77 | 0.45 | 0.14 | 0.2 |
| 6 | 0.71 | 0.16 | 0.17 | 0.04 |

### XVII. Example 5: Identification of MHC/Peptide Target-Reactive T Cells and TCRs

[0688] Target reactive T cells and TCRs are identified for one or more of the HIV subtype/HLA allele/epitope sequence combinations shown in Tables 35-45.

[0689] T cells are isolated from blood, lymph nodes, or tissues of patients. T cells can be enriched for antigen-specific T cells, e.g., by sorting antigen-MHC tetramer binding cells or by sorting activated cells stimulated in an in vitro co-culture of T cells and antigen-pulsed antigen presenting cells. Various reagents are known in the art for antigen-specific T cell identification including antigen-loaded tetramers and other MHC-based reagents.

[0690] Antigen-relevant alpha-beta (or gamma-delta) TCR dimers can be identified by single cell sequencing of TCRs of antigen-specific T cells. Alternatively, bulk TCR sequencing of antigen-specific T cells can be performed and alpha-beta pairs with a high probability of matching can be determined using a TCR pairing method known in the art.

[0691] Alternatively or in addition, antigen-specific T cells can be obtained through in vitro priming of naïve T cells from healthy donors. T cells obtained from PBMCs, lymph nodes, or cord blood can be repeatedly stimulated by antigen-pulsed antigen presenting cells to prime differentiation of antigen-experienced T cells. TCRs can then be identified similarly as described above for antigen-specific T cells from patients.

### XVIII. Example 6: Identification of Candidate Antigens

[0692] Candidate HIV antigens were identified for inclusion in the antigen-based vaccine using a series of steps. For each HIV subtype (subtypes A1, A2, B, C, D, F1, F2, G, H, J, and K), sequences for each of nine HIV genes (env, gag, nef, pol, rev, tat, vif, vpr, and vpu) were obtained from Los Alamos National Lab's HIV database¹⁰⁴. Amino acid sequences (8-11 amino acids in length) are extracted from sequences of the nine HIV genes for each HIV subtype. Specifically, a sliding window is applied to the sequences of the nine HIV genes to obtain the amino acid sequences (8-11 amino acids in length). These amino acid sequences were applied to the EDGE prediction model (a deep learning model trained on HLA presented peptides sequenced by MS/MS, as described in international patent application publications WO/2017/106638, WO/2018/195357, WO/2018/208856, and PCT/US19/33830, each herein incorporated by reference, in their entirety, for all purposes) across all modeled HLA alleles. All epitope sequence/HLA allele pair that has an EDGE score>0.01 was recorded for each HIV subtype. A total of 7096 unique epitope sequences were identified and the corresponding HLA allele for each sequence are shown in Tables 35-45.

### XIX. Example 7: Validation of Candidate Antigen Presentation

[0693] Mass spectrometry (MS) validation of candidate antigens is performed using targeted mass spectrometry methods. HIV tissue samples are obtained, homogenized, and used for RNASeq transcriptome sequencing and immunoprecipitation of the HLA/peptide complexes. A peptide target list is generated for each sample by analysis of the transcriptome. The EDGE deep learning model of antigen presentation is applied to the mutation sequence and expression data to prioritize peptides for the targeting list. The peptides from the HLA molecules are eluted and collected using size exclusion to isolate the presented peptides prior to mass spectrometry. Synthetic heavy labeled peptide with the same amino acid sequence is co-loaded with each sample for targeted mass spectrometry. Both coelution of the heavy labeled peptide with the experimental peptide and analysis of the fragmentation pattern are used to validate a candidate epitope sequence. Mass spectrometry analysis methods are described in more detail in Gillete et al. (Nat Methods. 2013 January; 10(1):28-34), herein incorporated by reference in its entirety for all purposes.

[0694] MS data are further evaluated to assess the value of narrowly targeting patients with specific HLAs for treatment, e.g., requiring patients to have at least one validated or predicted HLA allele that presents an antigen contained in a vaccine cassette. For example, a candidate epitope sequence may be selected for inclusion because it was predicted to be presented by a particular HLA protein. However, if the MS data demonstrates the contrary and that the candidate epitope sequence was not presented by the HLA protein, then the epitope sequence/HLA protein pair can be excluded for purposes of selection criteria for the vaccine.

### XX. Example 8: Vaccine Cassette Antigen Selection

[0695] Antigens including epitope sequences for inclusion in an antigen-based vaccine were chosen. Although the subsequent description refers to selection of antigenic peptides and subsequent inclusion of sequences in an antigen cassette, the sequences encoding for such selected antigenic peptides, one skilled in the art may understand that the subsequent description can also be applied for the inclusion of the antigenic peptides themselves in the antigen-based vaccine.

[0696] First, for each HIV subtype (A1, A2, B, C, D, F1, F2, G, H, J, and K), a corresponding Table in Tables 35-45 was identified (e.g., A1—Table 35, A2—Table 36, B—Table 37, C—Table 38, D—Table 39, F1—Table 40, F2—Table 41, G—Table 42, H—Table 43, J—Table 44, and K—Table 45).

[0697] Next, for each HLA allele in the table, epitope sequences (or antigen-encoding sequences that encode for each of the epitope sequences) for inclusion in the antigen-based vaccine were selected by identifying rows in the table that list the particular HLA allele.

[0698] Specifically, for a HIV subtype and HLA allele A0101, the antigen-encoding sequence for inclusion in the vaccine was selected by reference to the table corresponding to the HIV subtype, where each relevant sequence considered is selected by identifying all rows in that table that list A0101 (e.g., any of SEQ ID NOs: 325-328, 2166-2178, 4107-4113, 6242-6248, 8390-8397, 10627-10633, 12811-12820, 15080-15086, 17175-17184, 19389-19396, or 21004-21009).

[0699] For a HIV subtype and HLA allele A0201, the antigen-encoding sequence for inclusion in the vaccine was selected by reference to the table corresponding to the HIV subtype, where each relevant sequence considered is selected by identifying all rows in that table that list A0201 (e.g., any of SEQ ID NOs: 329-353, 2179-2200, 4114-4134, 6249-6270, 8398-8415, 10634-10654, 12821-12850, 15087-15107, 17185-17213, 19397-19420, or 21010-21031).

[0700] For a HIV subtype and HLA allele A0203, the antigen-encoding sequence for inclusion in the vaccine was selected by reference to the table corresponding to the HIV subtype, where each relevant sequence considered is selected by identifying all rows in that table that list A0203 (e.g., any of SEQ ID NOs: 354-403, 2201-2248, 4135-4177, 6271-6315, 8416-8474, 10655-10700, 12851-12912, 15108-15155, 17214-17264, 19421-19463, or 21032-21064).

[0701] For a HIV subtype and HLA allele A0204, the antigen-encoding sequence for inclusion in the vaccine was selected by reference to the table corresponding to the HIV subtype, where each relevant sequence considered is selected by identifying all rows in that table that list A0204 (e.g., any of SEQ ID NOs: 404-469, 2249-2326, 4178-4261, 6316-6400, 8475-8558, 10701-10768, 12913-12994, 15156-15214, 17265-17349, 19464-19518, 21065-21117).

[0702] For a HIV subtype and HLA allele A0205, the antigen-encoding sequence for inclusion in the vaccine was selected by reference to the table corresponding to the HIV subtype, where each relevant sequence considered is selected by identifying all rows in that table that list A0205 (e.g., any of SEQ ID NOs: 470-526, 2327-2379, 6401-6450, 8559-8626, 10769-10822, 12995-13056, 15215-15263, 17350-17405, 19519-19570, and 21118-21161).

[0703] For a HIV subtype and HLA allele A0206, the antigen-encoding sequence for inclusion in the vaccine was selected by reference to the table corresponding to the HIV subtype, where each relevant sequence considered is selected by identifying all rows in that table that list A0206 (e.g., any of SEQ ID NOs: 527-565, 2380-2421, 6451-6492, 8627-8671, 10823-10867, 10357-13098, 15264-15292, 17406-17448, 19571-19604, and 21162-21192).

[0704] For a HIV subtype and HLA allele A0207, the antigen-encoding sequence for inclusion in the vaccine was selected by reference to the table corresponding to the HIV subtype, where each relevant sequence considered is selected by identifying all rows in that table that list A0207 (e.g., any of SEQ ID NOs: 566-587, 2422-2438, 6493-6509, 8672-8689, 10868-10887, 13099-13125, 15293-15307, 17449-17473, 19605-19618, and 21193-21205).

[0705] For a HIV subtype and HLA allele A0208, the antigen-encoding sequence for inclusion in the vaccine was selected by reference to the table corresponding to the HIV subtype, where each relevant sequence considered is selected by identifying all rows in that table that list A0208 (e.g., any of SEQ ID NOs: 588-630, 2439-2477, 6510-6548, 8690-8733, 10888-10931, 13126-13179, 15308-15336, 17474-17512, 19619-19649, and 21206-21233).

[0706] For a HIV subtype and HLA allele A0301, the antigen-encoding sequence for inclusion in the vaccine was selected by reference to the table corresponding to the HIV subtype, where each relevant sequence considered is selected by identifying all rows in that table that list A0301 (e.g., any of SEQ ID NOs: 631-650, 2478-2501, 6549-6573, 8734-8761, 10932-10969, 13180-13224, 15337-15354, 17513-17543, 19650-19665, and 21234-21247).

[0707] For a HIV subtype and HLA allele A0302, the antigen-encoding sequence for inclusion in the vaccine was selected by reference to the table corresponding to the HIV subtype, where each relevant sequence considered is selected by identifying all rows in that table that list A0302 (e.g., any of SEQ ID NOs: 651-682, 2502-2541, 6574-6618, 8762-8809, 10970-11026, 13225-13290, 15355-15396, 17544-17603, 19666-19697, and 21248-21274).

[0708] For a HIV subtype and HLA allele A1011, the antigen-encoding sequence for inclusion in the vaccine was selected by reference to the table corresponding to the HIV subtype, where each relevant sequence considered is selected by identifying all rows in that table that list A1011 (e.g., any of SEQ ID NOs: 683-726, 2542-2583, 6619-6668, 8810-8862, 11027-11087, 13291-13370, 15397-15451, 17604-17652, 19698-19726, and 21275-21309).

[0709] For a HIV subtype and HLA allele A2301, the antigen-encoding sequence for inclusion in the vaccine was selected by reference to the table corresponding to the HIV subtype, where each relevant sequence considered is selected by identifying all rows in that table that list A2301 (e.g., any of SEQ ID NOs: 727-741, 2584-2593, 6669-6685, 8863-8871, 11088-11103, 13371-13385, 15452-15465, 17653-17667, 19727-19738, and 21310-21317).

[0710] For a HIV subtype and HLA allele A2302, the antigen-encoding sequence for inclusion in the vaccine was selected by reference to the table corresponding to the HIV subtype, where each relevant sequence considered is selected by identifying all rows in that table that list A2402 (e.g., any of SEQ ID NOs: 742-755, 2594-2605, 6686-6698, 8872-8885, 11104-11116, 13386-13397, 15466-15479, 17668-17679, 19739-19750, and 21318-21323).

[0711] For a HIV subtype and HLA allele A2501, the antigen-encoding sequence for inclusion in the vaccine was selected by reference to the table corresponding to the HIV subtype, where each relevant sequence considered is selected by identifying all rows in that table that list A2501 (e.g., any of SEQ ID NOs: 756-769, 2606-2622, 6699-6711, 8886-8903, 11117-11132, 13398-13414, 15480-15505, 17680-17693, 19751-19760, and 21324-21333).

[0712] For a HIV subtype and HLA allele A2601, the antigen-encoding sequence for inclusion in the vaccine was selected by reference to the table corresponding to the HIV subtype, where each relevant sequence considered is selected by identifying all rows in that table that list A2601 (e.g., any of SEQ ID NOs: 770-783, 2623-2640, 6712-6728, 8904-8927, 11133-11155, 13415-13433, 15506-15533, 17694-17714, 19761-19773, and 21334-21346).

[0713] For a HIV subtype and HLA allele A2602, the antigen-encoding sequence for inclusion in the vaccine was selected by reference to the table corresponding to the HIV subtype, where each relevant sequence considered is selected by identifying all rows in that table that list A2602 (e.g., any of SEQ ID NOs: 784-790, 2641-2652, 6729-6739, 8928-8937, 11156-11168, 13434-13446, 1553-15550, 17715-17723, 19774-19782, and 21347-21353).

[0714] For a HIV subtype and HLA allele A2603, the antigen-encoding sequence for inclusion in the vaccine was selected by reference to the table corresponding to the HIV subtype, where each relevant sequence considered is selected by identifying all rows in that table that list A2603 (e.g., any of SEQ ID NOs: 791-802, 2653-2671, 6740-6759, 8938-8959, 11169-11189, 13447-13464, 15551-15569, 17724-17739, 19783-19797, and 21354-21360).

[0715] For a HIV subtype and HLA allele A2901, the antigen-encoding sequence for inclusion in the vaccine was selected by reference to the table corresponding to the HIV subtype, where each relevant sequence considered is selected by identifying all rows in that table that list A2901 (e.g., any of SEQ ID NOs: 803-814, 2672-2679, 6760-6768, 8960-8976, 11190-11195, 13465-13474, 15570-15588, 17740-17751, 19798-19808, and 21361-21366).

[0716] For a HIV subtype and HLA allele A2902, the antigen-encoding sequence for inclusion in the vaccine was selected by reference to the table corresponding to the HIV subtype, where each relevant sequence considered is selected by identifying all rows in that table that list A2902 (e.g., any of SEQ ID NOs: 815-828, 2680-2698, 6769-6784, 8977-9000, 11196-11210, 13475-13493, 15589-15612, 17752-17773, 19809-19821, and 21367-21376).

[0717] For a HIV subtype and HLA allele A3001, the antigen-encoding sequence for inclusion in the vaccine was selected by reference to the table corresponding to the HIV subtype, where each relevant sequence considered is selected by identifying all rows in that table that list A3001 (e.g., any of SEQ ID NOs: 829-842, 2699-2707, 6785-6793, 9001-9012, 11211-11216, 13494-13501, 15613-15617, 17774-17781, 19822-19828, and 21377-21383).

[0718] For a HIV subtype and HLA allele A3002, the antigen-encoding sequence for inclusion in the vaccine was selected by reference to the table corresponding to the HIV subtype, where each relevant sequence considered is selected by identifying all rows in that table that list A3002 (e.g., any of SEQ ID NOs: 843-857, 2708-2722, 6794-6807, 9013-9040, 11217-11235, 13502-13519, 15618-15636, 17782-17809, 19829-19843, and 21384-21390).

[0719] For a HIV subtype and HLA allele A3004, the antigen-encoding sequence for inclusion in the vaccine was selected by reference to the table corresponding to the HIV subtype, where each relevant sequence considered is selected by identifying all rows in that table that list A3004 (e.g., any of SEQ ID NOs: 858-864, 2723-2728, 6808-6817, 9041-9060, 11236-11246, 13520-13530, 15637-15649, 17810-17828, 19844-19850, and 21391-21393).

[0720] For a HIV subtype and HLA allele A3101, the antigen-encoding sequence for inclusion in the vaccine was selected by reference to the table corresponding to the HIV subtype, where each relevant sequence considered is selected by identifying all rows in that table that list A3101 (e.g., any of SEQ ID NOs: 865-895, 2729-2757, 6818-6846, 9061-9082, 11247-11272, 13531-13558, 15650-15683, 17829-17862, 19851-19869, and 21394-21407).

[0721] For a HIV subtype and HLA allele A3201, the antigen-encoding sequence for inclusion in the vaccine was selected by reference to the table corresponding to the HIV subtype, where each relevant sequence considered is selected by identifying all rows in that table that list A3201 (e.g., any of SEQ ID NOs: 896-899, 2758-2761, 6847-6850, 9083-9091, 11273-11275, 13559-13567, 15684-15688, 17863-17870, 19870-19874, and 21408-21409).

[0722] For a HIV subtype and HLA allele A3301, the antigen-encoding sequence for inclusion in the vaccine was selected by reference to the table corresponding to the HIV subtype, where each relevant sequence considered is selected by identifying all rows in that table that list A3301 (e.g., any of SEQ ID NOs: 900-920, 2762-2793, 6851-6880, 9092-9112, 11276-11300, 13568-13585, 15689-15707, 17871-17900, 19875-19898, and 21410-21425).

[0723] For a HIV subtype and HLA allele A3303, the antigen-encoding sequence for inclusion in the vaccine was selected by reference to the table corresponding to the HIV subtype, where each relevant sequence considered is selected by identifying all rows in that table that list A3303 (e.g., any of SEQ ID NOs: 921-955, 2794-2851, 6881-6935, 9113-9164, 11301-11346, 13586-13619, 15708-15742, 17901-17964, 19899-19933, and 21426-21459).

[0724] For a HIV subtype and HLA allele A6801, the antigen-encoding sequence for inclusion in the vaccine was selected by reference to the table corresponding to the HIV subtype, where each relevant sequence considered is selected by identifying all rows in that table that list A6801 (e.g., any of SEQ ID NOs: 956-997, 2852-2908, 6936-6986, 9165-9228, 11347-11410, 13620-13667, 15743-15785, 17965-18029, 19934-19986, and 21460-24192).

[0725] For a HIV subtype and HLA allele A6802, the antigen-encoding sequence for inclusion in the vaccine was selected by reference to the table corresponding to the HIV subtype, where each relevant sequence considered is selected by identifying all rows in that table that list A6802 (e.g., any of SEQ ID NOs: 998-1032, 2909-2946, 6897-7037, 9229-9292, 11411-11461, 13668-13715, 15786-15828, 18030-18068, 19987-20027, and 24193-21523).

[0726] For a HIV subtype and HLA allele B0702, the antigen-encoding sequence for inclusion in the vaccine was selected by reference to the table corresponding to the HIV subtype, where each relevant sequence considered is selected by identifying all rows in that table that list B0702 (e.g., any of SEQ ID NOs: 1033-1050, 2947-2969, 7038-7065, 9293-9312, 11462-11485, 13716-13738, 15829-15849, 18069-18091, 20028-20038, and 21524-21540).

[0727] For a HIV subtype and HLA allele B0801, the antigen-encoding sequence for inclusion in the vaccine was selected by reference to the table corresponding to the HIV subtype, where each relevant sequence considered is selected by identifying all rows in that table that list B0801 (e.g., any of SEQ ID NOs: 1051-1066, 2970-2984, 7066-7078, 9313-9325, 11486-11497, 13739-13752, 15850-15862, 18092-18112, 20039-20051, and 21541-21549).

[0728] For a HIV subtype and HLA allele B1301, the antigen-encoding sequence for inclusion in the vaccine was selected by reference to the table corresponding to the HIV subtype, where each relevant sequence considered is selected by identifying all rows in that table that list B1301 (e.g., any of SEQ ID NOs: 1067-1080, 2985-2999, 7079-7095, 9326-9347, 11498-11516, 13753-13767, 15863-15875, 18113-18128, 20052-20062, and 21550-21557).

[0729] For a HIV subtype and HLA allele B1302, the antigen-encoding sequence for inclusion in the vaccine was selected by reference to the table corresponding to the HIV subtype, where each relevant sequence considered is selected by identifying all rows in that table that list B1302 (e.g., any of SEQ ID NOs: 1081-1117, 3000-3052, 7096-7140, 9348-9406, 11517-11557, 13768-13821, 15876-15923, 18129-18178, 20063-20093, and 21558-21593).

[0730] For a HIV subtype and HLA allele B1401, the antigen-encoding sequence for inclusion in the vaccine was selected by reference to the table corresponding to the HIV subtype, where each relevant sequence considered is selected by identifying all rows in that table that list B1401 (e.g., any of SEQ ID NOs: 1118-1125, 3053-3058, 7141-7145, 9407-9411, 11558-11562, 13822-13827, 15924-15931, 18179-18185, 20094-20098, and 21594-21599).

[0731] For a HIV subtype and HLA allele B1402, the antigen-encoding sequence for inclusion in the vaccine was selected by reference to the table corresponding to the HIV subtype, where each relevant sequence considered is selected by identifying all rows in that table that list B1402 (e.g., any of SEQ ID NOs: 1126-1139, 3059-3070, 7146-7159, 9412-9418, 11563-11574, 13828-13837, 15932-15943, 18186-18197, 20099-20109, and 21600-21606).

[0732] For a HIV subtype and HLA allele B1501, the antigen-encoding sequence for inclusion in the vaccine was selected by reference to the table corresponding to the HIV subtype, where each relevant sequence considered is selected by identifying all rows in that table that list B1501 (e.g., any of SEQ ID NOs: 1140-1192, 3071-3111, 7160-7211, 9419-9481, 11575-11633, 13838-13895, 15944-16001, 18198-18259, 20110-20141, and 21607-21635).

[0733] For a HIV subtype and HLA allele B1502, the antigen-encoding sequence for inclusion in the vaccine was selected by reference to the table corresponding to the HIV subtype, where each relevant sequence considered is selected by identifying all rows in that table that list B1502 (e.g., any of SEQ ID NOs: 1193-1220, 3112-3135, 7212-7247, 9482-9501, 11634-11670, 13896-13937, 16002-16036, 18260-18300, 20142-20165, and 21636-21656).

[0734] For a HIV subtype and HLA allele B1503, the antigen-encoding sequence for inclusion in the vaccine was selected by reference to the table corresponding to the HIV subtype, where each relevant sequence considered is selected by identifying all rows in that table that list B1503 (e.g., any of SEQ ID NOs: 1221-1245, 3136-3152, 7248-7273, 9502-9526, 11671-11693, 13938-13968, 16037-16065, 18301-18324, 20166-20179, and 21657-21669).

[0735] For a HIV subtype and HLA allele B1510, the antigen-encoding sequence for inclusion in the vaccine was selected by reference to the table corresponding to the HIV subtype, where each relevant sequence considered is selected by identifying all rows in that table that list B1510 (e.g., any of SEQ ID NOs: 1246-1266, 3153-3178, 7274-7296, 9527-9548, 11694-11722, 13969-13995, 16066-16083, 18325-18352, 20180-20200, and 21670-21689).

[0736] For a HIV subtype and HLA allele B1513, the antigen-encoding sequence for inclusion in the vaccine was selected by reference to the table corresponding to the HIV subtype, where each relevant sequence considered is selected by identifying all rows in that table that list B1513 (e.g., any of SEQ ID NOs: 1267-1270, 3179-3183, 7297-7300, 9549-9551, 11723-11725, 13996-14005, 16084-16091, 18353-18358, 20201-20205, and 21690-21692).

[0737] For a HIV subtype and HLA allele B1801, the antigen-encoding sequence for inclusion in the vaccine was selected by reference to the table corresponding to the HIV subtype, where each relevant sequence considered is selected by identifying all rows in that table that list B1801 (e.g., any of SEQ ID NOs: 1271-1286, 3184-3203, 7301-7328, 9552-9565, 11726-11742, 14006-14024, 16092-16107, 18359-18375, 20206-20224, and 21693-21705).

[0738] For a HIV subtype and HLA allele B2702, the antigen-encoding sequence for inclusion in the vaccine was selected by reference to the table corresponding to the HIV subtype, where each relevant sequence considered is selected by identifying all rows in that table that list B2702 (e.g., any of SEQ ID NOs: 1287-1304, 3204-3225, 7329-7355, 9566-9594, 11743-11756, 14025-14048, 16108-16135, 18376-18408, 20225-20241, and 21706-21716).

[0739] For a HIV subtype and HLA allele B2705, the antigen-encoding sequence for inclusion in the vaccine was selected by reference to the table corresponding to the HIV subtype, where each relevant sequence considered is selected by identifying all rows in that table that list B2705 (e.g., any of SEQ ID NOs: 1305-1319, 3226-3234, 7356-7370, 9595-9610, 11757-11771, 14049-14063, 16136-16145, 18409-18422, 20242-20254, and 21717-21723)-.

[0740] For a HIV subtype and HLA allele B3501, the antigen-encoding sequence for inclusion in the vaccine was selected by reference to the table corresponding to the HIV subtype, where each relevant sequence considered is selected by identifying all rows in that table that list B3501 (e.g., any of SEQ ID NOs: 1320-1338, 3235-3260, 7371-7405, 9611-9641, 11772-11812, 14064-14095, 16146-16186, 18423-18463, 20255-20279, and 21724-21745).

[0741] For a HIV 4subtype and HLA allele B3502, the antigen-encoding sequence for inclusion in the vaccine was selected by reference to the table corresponding to the HIV subtype, where each relevant sequence considered is selected by identifying all rows in that table that list B3502 (e.g., any of SEQ ID NOs: 1339-1349, 3261-3272, 7406-7424, 9642-9661, 11813-11833, 14096-14112, 16187-16205, 18464-18482, 20280-20291, and 21746-21754).

[0742] For a HIV subtype and HLA allele B3503, the antigen-encoding sequence for inclusion in the vaccine was selected by reference to the table corresponding to the HIV subtype, where each relevant sequence considered is selected by identifying all rows in that table that list B3503 (e.g., any of SEQ ID NOs: 1350-1373, 3273-3298, 7425-7457, 9662-9697, 11834-11877, 14113-14148, 16206-16238, 18483-18513, 20292-20316, and 21755-21772).

[0743] For a HIV subtype and HLA allele B3508, the antigen-encoding sequence for inclusion in the vaccine was selected by reference to the table corresponding to the HIV subtype, where each relevant sequence considered is selected by identifying all rows in that table that list B3508 (e.g., any of SEQ ID NOs: 1374-1386, 3299-3309, 7458-7477, 9698-9719, 11878-11899, 14149-14166, 16239-16256, 18514-18538, 20317-20331, and 21773-21786).

[0744] For a HIV subtype and HLA allele B3512, the antigen-encoding sequence for inclusion in the vaccine was selected by reference to the table corresponding to the HIV subtype, where each relevant sequence considered is selected by identifying all rows in that table that list B3512 (e.g., any of SEQ ID NOs: 1387-1405, 3310-3326, 7478-7498, 9720-9744, 11900-11930, 14167-14185, 16257-16280, 18539-18560, 20332-20344, and 21787-21799).

[0745] For a HIV subtype and HLA allele B3701, the antigen-encoding sequence for inclusion in the vaccine was selected by reference to the table corresponding to the HIV subtype, where each relevant sequence considered is selected by identifying all rows in that table that list BB3701 (e.g., any of SEQ ID NOs: 1406-1425, 3327-3338, 7499-7512, 9745-9757, 11931-11944, 14186-14196, 16281-16291, 18561-18572, 20345-20359, and 21800-21808).

[0746] For a HIV subtype and HLA allele B3801, the antigen-encoding sequence for inclusion in the vaccine was selected by reference to the table corresponding to the HIV subtype, where each relevant sequence considered is selected by identifying all rows in that table that list B3801 (e.g., any of SEQ ID NOs: 1426-1451, 3339-3367, 7513-7533, 9758-9782, 11945-11970, 14197-14219, 16292-16310, 18573-18599, 20360-20381, and 21809-21828).

[0747] For a HIV subtype and HLA allele B3901, the antigen-encoding sequence for inclusion in the vaccine was selected by reference to the table corresponding to the HIV subtype, where each relevant sequence considered is selected by identifying all rows in that table that list B3901 (e.g., any of SEQ ID NOs: 1452-1476, 3368-3391, 7534-7551, 9783-9802, 11971-11992, 14220-14242, 16311-16323, 18600-18619, 20382-20395, and 21829-21844).

[0748] For a HIV subtype and HLA allele B3906, the antigen-encoding sequence for inclusion in the vaccine was selected by reference to the table corresponding to the HIV subtype, where each relevant sequence considered is selected by identifying all rows in that table that list B3906 (e.g., any of SEQ ID NOs: 1477-1499, 3392-3423, 7552-7571, 9803-9831, 11993-12020, 14243-14277, 16324-16349, 18620-18653, 20396-20411, and 21845-21861).

[0749] For a HIV subtype and HLA allele B4001, the antigen-encoding sequence for inclusion in the vaccine was selected by reference to the table corresponding to the HIV subtype, where each relevant sequence considered is selected by identifying all rows in that table that list B4001 (e.g., any of SEQ ID NOs: 1500-1527, 3424-3458, 7572-7614, 9832-9867, 12021-12057, 14278-14309, 16350-16384, 18654-18686, 20412-20431, and 21862-21888).

[0750] For a HIV subtype and HLA allele B4002, the antigen-encoding sequence for inclusion in the vaccine was selected by reference to the table corresponding to the HIV subtype, where each relevant sequence considered is selected by identifying all rows in that table that list B4002 (e.g., any of SEQ ID NOs: 1528-1576, 3459-3497, 7615-7665, 9868-9913, 12058-12110, 14310-14359, 16385-16431, 18687-18736, 20432-20460, and 21889-21924).

[0751] For a HIV subtype and HLA allele B4006, the antigen-encoding sequence for inclusion in the vaccine was selected by reference to the table corresponding to the HIV subtype, where each relevant sequence considered is selected by identifying all rows in that table that list B4006 (e.g., any of SEQ ID NOs: 1577-1593, 3498-3517, 7666-7689, 9914-9942, 12111-12136, 14360-14380, 16432-16463, 18737-18759, 20461-20479, and 21925-21940).

[0752] For a HIV subtype and HLA allele 4102, the antigen-encoding sequence for inclusion in the vaccine was selected by reference to the table corresponding to the HIV subtype, where each relevant sequence considered is selected by identifying all rows in that table that list B4102 (e.g., any of SEQ ID NOs: 1594-1642, 3518-3554, 7690-7742, 9943-9988, 12137-12175, 14381-14429, 16437-16510, 18760-18811, 20480-20512, and 21941-21975).

[0753] For a HIV subtype and HLA allele B4402, the antigen-encoding sequence for inclusion in the vaccine was selected by reference to the table corresponding to the HIV subtype, where each relevant sequence considered is selected by identifying all rows in that table that list B4402 (e.g., any of SEQ ID NOs: 1643-1663, 3555-3575, 7743-7772, 9989-10011, 12176-12202, 14430-14448, 16510-16527, 18812-18834, 20513-20530, and 21976-21992).

[0754] For a HIV subtype and HLA allele B4403, the antigen-encoding sequence for inclusion in the vaccine was selected by reference to the table corresponding to the HIV subtype, where each relevant sequence considered is selected by identifying all rows in that table that list B4403 (e.g., any of SEQ ID NOs: 1664-1697, 3576-3611, 7773-7826, 10012-10058, 12203-12254, 14449-14493, 16528-16562, 18835-18883, 20531-20564, and 21993-22024).

[0755] For a HIV subtype and HLA allele B4405, the antigen-encoding sequence for inclusion in the vaccine was selected by reference to the table corresponding to the HIV subtype, where each relevant sequence considered is selected by identifying all rows in that table that list B4405 (e.g., any of SEQ ID NOs: 1698-1745, 3612-3674, 7827-7903, 10059-10134, 12255-12327, 14494-14560, 16563-16633, 18884-18953, 20565-20613, and 22025-22067).

[0756] For a HIV subtype and HLA allele B4601, the antigen-encoding sequence for inclusion in the vaccine was selected by reference to the table corresponding to the HIV subtype, where each relevant sequence considered is selected by identifying all rows in that table that list B4601 (e.g., any of SEQ ID NOs: 1746-1752, 3675-3679, 7904-7910, 10135-10146, 12328-12339, 14561-14574, 16634-16645, 18954-18957, 20614-20619, and 22068-22069).

[0757] For a HIV subtype and HLA allele B4801, the antigen-encoding sequence for inclusion in the vaccine was selected by reference to the table corresponding to the HIV subtype, where each relevant sequence considered is selected by identifying all rows in that table that list B4801 (e.g., any of SEQ ID NOs: 1753-1785, 3680-3695, 7911-7926, 10147-10161, 12340-12359, 14575-14596, 16646-16664, 18958-18974, 20620-20636, and 22070-22081).

[0758] For a HIV subtype and HLA allele B4901, the antigen-encoding sequence for inclusion in the vaccine was selected by reference to the table corresponding to the HIV subtype, where each relevant sequence considered is selected by identifying all rows in that table that list B4901 (e.g., any of SEQ ID NOs: 1786-1824, 3696-3719, 7927-7967, 10162-10207, 12360-12395, 14597-14634, 16665-16709, 18975-19013, 20637-20656, and 22082-22109).

[0759] For a HIV subtype and HLA allele B5001, the antigen-encoding sequence for inclusion in the vaccine was selected by reference to the table corresponding to the HIV subtype, where each relevant sequence considered is selected by identifying all rows in that table that list B5001 (e.g., any of SEQ ID NOs: 1825-1855, 3720-3755, 7968-8008, 10208-10251, 12396-12438, 14635-14675, 16710-16748, 19014-19051, 20657-20682, and 22110-22129).

[0760] For a HIV subtype and HLA allele B5101, the antigen-encoding sequence for inclusion in the vaccine was selected by reference to the table corresponding to the HIV subtype, where each relevant sequence considered is selected by identifying all rows in that table that list B5101 (e.g., any of SEQ ID NOs: 1856-1872, 3756-3789, 8009-8037, 10252-10287, 12439-12467, 14676-14708, 16749-16783, 19052-19076, 20683-20711, and 22130-22158).

[0761] For a HIV subtype and HLA allele B5401, the antigen-encoding sequence for inclusion in the vaccine was selected by reference to the table corresponding to the HIV subtype, where each relevant sequence considered is selected by identifying all rows in that table that list B5401 (e.g., any of SEQ ID NOs: 1873-1900, 3790-3823, 8038-8075, 10288-10327, 12468-12507, 14709-14745, 16784-16826, 19077-19108, 207120-20748, and 22159-22178).

[0762] For a HIV subtype and HLA allele B5501, the antigen-encoding sequence for inclusion in the vaccine was selected by reference to the table corresponding to the HIV subtype, where each relevant sequence considered is selected by identifying all rows in that table that list B5501 (e.g., any of SEQ ID NOs: 1901-1907, 3824-3827, 8076-8088, 10328-10341, 12508-12520, 14746-14756, 16827-16841, 19109-19113, 20749-20759, and 22179-22184).

[0763] For a HIV subtype and HLA allele B5502, the antigen-encoding sequence for inclusion in the vaccine was selected by reference to the table corresponding to the HIV subtype, where each relevant sequence considered is selected by identifying all rows in that table that list B5502 (e.g., any of SEQ ID NOs: 1908-1924, 3828-3843, 8089-8109, 10342-10364, 12521-12543, 14757-14777, 16842-16867, 19114-19135, 20760-20785, and 22185-22194).

[0764] For a HIV subtype and HLA allele B5601, the antigen-encoding sequence for inclusion in the vaccine was selected by reference to the table corresponding to the HIV subtype, where each relevant sequence considered is selected by identifying all rows in that table that list B5601 (e.g., any of SEQ ID NOs: 1925-1945, 3844-3865, 8110-8136, 10365-10392, 12544-12565, 14778-14802, 16868-16897, 19136-19156, 20786-20810, and 22195-22209).

[0765] For a HIV subtype and HLA allele B5701, the antigen-encoding sequence for inclusion in the vaccine was selected by reference to the table corresponding to the HIV subtype, where each relevant sequence considered is selected by identifying all rows in that table that list B5701 (e.g., any of SEQ ID NOs: 1946-1985, 3866-3908, 8137-8188, 10393-10441, 12566-12606, 14803-14849, 16898-16956, 19157-19202, 20811-20848, and 22210-22234).

[0766] For a HIV subtype and HLA allele B5801, the antigen-encoding sequence for inclusion in the vaccine was selected by reference to the table corresponding to the HIV subtype, where each relevant sequence considered is selected by identifying all rows in that table that list B5801 (e.g., any of SEQ ID NOs: 1986-2019, 3909-3942, 8189-8218, 10442-10467, 12607-12632, 14850-14873, 16957-16992, 19203-19232, 20849-20875, and 22235-22252).

[0767] For a HIV subtype and HLA allele C0102, the antigen-encoding sequence for inclusion in the vaccine was selected by reference to the table corresponding to the HIV subtype, where each relevant sequence considered is selected by identifying all rows in that table that list C0102 (e.g., any of SEQ ID NOs: 2020-2026, 3943-3945, 8219-8224, 10468-10472, 12633-12644, 14874-14881, 16993-16996, 19233-19242, 20876-20880, and 22253-22255).

[0768] For a HIV subtype and HLA allele C0202, the antigen-encoding sequence for inclusion in the vaccine was selected by reference to the table corresponding to the HIV subtype, where each relevant sequence considered is selected by identifying all rows in that table that list CO202 (e.g., any of SEQ ID NOs: 2027-2028, 3946-3947, 8225-8227, 10473-10476, 12645-12647, 14882-14887, 16997-16999, 19243-19245, 20881-20883, and 22256-22262).

[0769] For a HIV subtype and HLA allele C0302, the antigen-encoding sequence for inclusion in the vaccine was selected by reference to the table corresponding to the HIV subtype, where each relevant sequence considered is selected by identifying all rows in that table that list C0302 (e.g., any of SEQ ID NOs: 2029-2034, 3948-3956, 8228-8233, 10477-10484, 12648-12657, 14888-14900, 17000-17007, 19246-19253, 20884-20888, and 22263-22266).

[0770] For a HIV subtype and HLA allele C0303, the antigen-encoding sequence for inclusion in the vaccine was selected by reference to the table corresponding to the HIV subtype, where each relevant sequence considered is selected by identifying all rows in that table that list C0303 (e.g., any of SEQ ID NOs: 2035-2039, 3957-3962, 8234-8239, 10485-10491, 12658-12663, 14901-14911, 17008-17016, 19254-19257, 20889-20893, and 22267-22272).

[0771] For a HIV subtype and HLA allele C0304, the antigen-encoding sequence for inclusion in the vaccine was selected by reference to the table corresponding to the HIV subtype, where each relevant sequence considered is selected by identifying all rows in that table that list C0304 (e.g., any of SEQ ID NOs: 2040-2047, 3963-3974, 8240-8250, 10492-10502, 12664-12676, 14912-14927, 17017-17029, 19258-19270, 20894-20901, and 22273-22274).

[0772] For a HIV subtype and HLA allele C0401, the antigen-encoding sequence for inclusion in the vaccine was selected by reference to the table corresponding to the HIV subtype, where each relevant sequence considered is selected by identifying all rows in that table that list C0401 (e.g., any of SEQ ID NOs: 2048-2052, 3975-3979, 8251-8257, 10503-10505, 12677-12680, 14928-14932, 17030-17033, 19271-19277, 20902-20903, and 22275-22281).

[0773] For a HIV subtype and HLA allele C0501, the antigen-encoding sequence for inclusion in the vaccine was selected by reference to the table corresponding to the HIV subtype, where each relevant sequence considered is selected by identifying all rows in that table that list C0501 (e.g., any of SEQ ID NOs: 2053-2057, 3980-3992, 8258-8262, 10506-10514, 12681-12692, 14933-14944, 17034-17041, 19278-19288, 20904-20911, and 22282-22283).

[0774] For a HIV subtype and HLA allele C0602, the antigen-encoding sequence for inclusion in the vaccine was selected by reference to the table corresponding to the HIV subtype, where each relevant sequence considered is selected by identifying all rows in that table that list C0602 (e.g., any of SEQ ID NOs: 2058-2059, 3993-3995, 8263, 10515-10518, 12693-12697, 14945-14948, 17042-17045, 19289-19290, 20912-20913, 22284-22295).

[0775] For a HIV subtype and HLA allele C0701, the antigen-encoding sequence for inclusion in the vaccine was selected by reference to the table corresponding to the HIV subtype, where each relevant sequence considered is selected by identifying all rows in that table that list C0701 (e.g., any of SEQ ID NOs: 8264 and 17046).

[0776] For a HIV subtype and HLA allele C0702, the antigen-encoding sequence for inclusion in the vaccine was selected by reference to the table corresponding to the HIV subtype, where each relevant sequence considered is selected by identifying all rows in that table that list C0702 (e.g., any of SEQ ID NOs: 2060, 3996-3997, 12698, and 14949).

[0777] For a HIV subtype and HLA allele C0704, the antigen-encoding sequence for inclusion in the vaccine was selected by reference to the table corresponding to the HIV subtype, where each relevant sequence considered is selected by identifying all rows in that table that list C0704 (e.g., any of SEQ ID NOs: 2061, 3998, 10519, and 17047).

[0778] For a HIV subtype and HLA allele C0801, the antigen-encoding sequence for inclusion in the vaccine was selected by reference to the table corresponding to the HIV subtype, where each relevant sequence considered is selected by identifying all rows in that table that list C0801 (e.g., any of SEQ ID NOs: 2062-2079, 3999-4013, 8265-8274, 10520-10533, 12699-12721, 14950-14974, 17048-17069, 19291-19304, 20914-20923, and 22284-22295).

[0779] For a HIV subtype and HLA allele C0802, the antigen-encoding sequence for inclusion in the vaccine was selected by reference to the table corresponding to the HIV subtype, where each relevant sequence considered is selected by identifying all rows in that table that list C0802 (e.g., any of SEQ ID NOs: 2080-2088, 4014-4031, 8275-8288, 10534-10545, 12722-12739, 14975-14987, 17070-1076, 19305-19321, 20924-20929, and 22296-22300).

[0780] For a HIV subtype and HLA allele C0803, the antigen-encoding sequence for inclusion in the vaccine was selected by reference to the table corresponding to the HIV subtype, where each relevant sequence considered is selected by identifying all rows in that table that list C0803 (e.g., any of SEQ ID NOs: 2089-2100, 4032-4035, 8289-8295, 10546-10548, 12740-12742, 14988-14997, 17077-17079, 19322-19324, 20930-20938, and 22301-22304).

[0781] For a HIV subtype and HLA allele C1203, the antigen-encoding sequence for inclusion in the vaccine was selected by reference to the table corresponding to the HIV subtype, where each relevant sequence considered is selected by identifying all rows in that table that list C1203 (e.g., any of SEQ ID NOs: 2101-2105, 4036-4043, 8296-8302, 10549-10555, 102743-12748, 14998-15007, 17080-17089, 19325-19332, 20939-20947, and 22305-22310).

[0782] For a HIV subtype and HLA allele C1402, the antigen-encoding sequence for inclusion in the vaccine was selected by reference to the table corresponding to the HIV subtype, where each relevant sequence considered is selected by identifying all rows in that table that list C1402 (e.g., any of SEQ ID NOs: 2106-2122, 4044-4058, 8303-8329, 10556-10574, 12749-12763, 15008-15025, 17090-17108, 19333-19348, 20948-20962, and 22311-22320).

[0783] For a HIV subtype and HLA allele C1403, the antigen-encoding sequence for inclusion in the vaccine was selected by reference to the table corresponding to the HIV subtype, where each relevant sequence considered is selected by identifying all rows in that table that list C1403 (e.g., any of SEQ ID NOs: 2123-2133, 4059-4069, 8330-8342, 10575-10587, 12764-12772 15026-15035, 17109-17124, 19349-19361, 20963-20970, and 22321-22327).

[0784] For a HIV subtype and HLA allele C1502, the antigen-encoding sequence for inclusion in the vaccine was selected by reference to the table corresponding to the HIV subtype, where each relevant sequence considered is selected by identifying all rows in that table that list C1502 (e.g., any of SEQ ID NOs: 2134-2138, 4070-4074, 8343-8354, 10588-10591, 12773-12778, 15036-15040, 17125-17135, 19362-19366, 20971-20978, and 22328-22332).

[0785] For a HIV subtype and HLA allele C1601, the antigen-encoding sequence for inclusion in the vaccine was selected by reference to the table corresponding to the HIV subtype, where each relevant sequence considered is selected by identifying all rows in that table that list C1601 (e.g., any of SEQ ID NOs: 2139-2143, 4075-4079, 8355-8358, 10592-10595, 12779-12782, 15041-15048, 17136-17144, 19367-19370, 20979-20983, and 22333-22334).

[0786] For a HIV subtype and HLA allele C1602, the antigen-encoding sequence for inclusion in the vaccine was selected by reference to the table corresponding to the HIV subtype, where each relevant sequence considered is selected by identifying all rows in that table that list C1602 (e.g., any of SEQ ID NOs: 2144-2151, 4080-4089, 8359-8367, 10596-10602, 12783-12792, 15049-15058, 17145-17157, 19371-19376, 20984-20992, and 22335-22340).

[0787] For a HIV subtype and HLA allele C1604, the antigen-encoding sequence for inclusion in the vaccine was selected by reference to the table corresponding to the HIV subtype, where each relevant sequence considered is selected by identifying all rows in that table that list C1604 (e.g., any of SEQ ID NOs: 2152-2160, 4090-4098, 8368-8381, 10603-10615, 12793-12803, 15059-15069, 17158-17165, 19377-19382, 20994-20998, and 22341-22345).

[0788] For a HIV subtype and HLA allele C1701, the antigen-encoding sequence for inclusion in the vaccine was selected by reference to the table corresponding to the HIV subtype, where each relevant sequence considered is selected by identifying all rows in that table that list C1701 (e.g., any of SEQ ID NOs: 2161-2165, 4099-4106, 8382-8389, 10616-10626, 12804-12810, 15070-15079, 17166-17174, 19383-19388, 20999-21003, and 22346-22349).

### XXI. Example 9: Evaluation of T Cell Recognition of Candidate Antigens

[0789] The candidate antigens are evaluated to determine whether they induce an immune response in patients. Specifically, peripheral blood mononuclear cells (PBMCs) from healthy donors are enriched for naïve CD8+ T cells. The healthy donors are confirmed to have the HLA allele B4102. The CD8+ T cells are stained with MHC multimers presenting several of the candidate antigens including epitope sequences present in the vaccine cassette: a first antigen including the epitope sequence “AEVVQKVTM (SEQ ID NO: 148)” and a second antigen including the epitope sequence “AEVVQKVVM (SEQ ID NO: 149).” HLA-peptide binding cells are sorted, expanded and their specificity for the antigens are confirmed. TCR sequencing of antigen-specific T cells is performed. FIG. 20 illustrates the general TCR sequencing strategy and workflow. TCR sequencing strategy reveal a polyclonal response. The naïve T cell repertoire analysis suggests the candidate antigens are expected to induce an immune response in select patients when administered by vaccination.

### XXI. Example 10: Performance of EDGE Machine Learning Model for Identifying HIV Epitopes

[0790] FIG. 36 depicts the predictive capacity of the EDGE machine learning model in comparison to a public prediction tool for predicting HIV epitopes that are presented by class I HLA alleles. Specifically, the EDGE machine learning model was trained on 507,502 peptides presented in mass spectrometry across 398 samples and covers 116 identified alleles. The EDGE machine learning model generates per-allele scores, each per-allele score representing a likelihood that a HIV epitope is presented by a particular class I HLA allele. Example alleles are shown in the column entitled “HLA” in any one of Tables 35-45. Additionally, these per-allele likelihoods can be aggregated to determine a likelihood that the HIV epitope is presented by at least one of the class I HLA alleles. In comparison, the public prediction tool for predicting HIV epitopes was the MHCflurry¹⁰⁷.

[0791] The EDGE model and MHCflurry were deployed on a test dataset of HIV CD8+ epitopes obtained from the Los Alamos HIV Database to predict HIV epitopes that are presented by at least one class I HLA allele. As shown in FIG. 36, the EDGE model outperforms MHCflurry. Specifically, at a 40% recall rate, the EDGE model exhibited a precision value of 0.28 whereas MHCflurry exhibited a precision value of 0.15. Additionally, EDGE outperforms MHCflurry with an area under the curve (AUC)=0.24 compared to 0.13.

[0792] Altogether, this Example demonstrates that the EDGE machine learning model is able to better predict HIV epitopes that are presented by one or more class I HLA alleles in comparison to a conventional, publicly available model. Therefore, in comparison to epitopes identified through conventional methods, epitopes identified through the use of the EDGE machine learning model, such as epitopes shown in the column entitled “Epitope sequence” in any one of Tables 35-45 (e.g., any one of SEQ ID Nos: 325-22349), are more likely to be presented by one or more class I HLA alleles.

### Certain Sequences

[0793] Vectors, cassettes, and antibodies referred to herein are described below and referred to by SEQ ID NO.

Tremelimumab VL (SEQ ID NO: 16)
Tremelimumab VH (SEQ ID NO: 17)
Tremelimumab VH CDR1 (SEQ ID NO: 18)
Tremelimumab VH CDR2 (SEQ ID NO: 19)
Tremelimumab VH CDR3 (SEQ ID NO: 20)
Tremelimumab VL CDR1 (SEQ ID NO: 21)
Tremelimumab VL CDR2 (SEQ ID NO: 22)
Tremelimumab VL CDR3 (SEQ ID NO: 23)
Durvalumab (MEDI4736) VL (SEQ ID NO: 24)
MEDI4736 VH (SEQ ID NO: 25)
MEDI4736 VH CDR1 (SEQ ID NO: 26)
MEDI4736 VH CDR2 (SEQ ID NO: 27)
MEDI4736 VH CDR3 (SEQ ID NO: 28)
MEDI4736 VL CDR1 (SEQ ID NO: 29)
MEDI4736 VL CDR2 (SEQ ID NO: 30)
MEDI4736 VL CDR3 (SEQ ID NO: 31)
UbA76-25merPDTT nucleotide (SEQ ID NO: 32)
UbA76-25merPDTT polypeptide (SEQ ID NO: 33)
MAG-25merPDTT nucleotide (SEQ ID NO: 34)
MAG-25merPDTT polypeptide (SEQ ID NO: 35)
Ub7625merPDTT_NoSFL nucleotide (SEQ ID NO: 36)
Ub7625merPDTT_NoSFL polypeptide (SEQ ID NO: 37)
ChAdV68.5WTnt.MAG25mer (SEQ ID NO: 2); AC_000011.1 with E1 (nt 577 to 3403)
and E3 (nt 27,125-31,825) sequences deleted; corresponding ATCC VR-594
nucleotides substituted at five positions; model antigen cassette under
the control of the CMV promoter/enhancer inserted in place of deleted E1;
SV40 polyA 3′ of cassette
Venezuelan equine encephalitis virus [VEE] (SEQ ID NO: 3) GenBank: L01442.2
VEE-MAG25mer (SEQ ID NO: 4); contains MAG-25merPDTT nucleotide (bases 30-1755)
Venezuelan equine encephalitis virus strain TC-83 [TC-83] (SEQ ID NO: 5)
GenBank: L01443.1
VEE Delivery Vector (SEQ ID NO: 6); VEE genome with nucleotides 7544-11175
deleted [alphavirus structural proteins removed]
TC-83 Delivery Vector (SEQ ID NO: 7); TC-83 genome with nucleotides 7544-
11175 deleted [alphavirus structural proteins removed]
VEE Production Vector (SEQ ID NO: 8); VEE genome with nucleotides 7544-
11175 deleted, plus 5′ T7-promoter, plus 3′ restriction sites
TC-83 Production Vector (SEQ ID NO: 9); TC-83 genome with nucleotides 7544-
11175 deleted, plus 5′ T7-promoter, plus 3′ restriction sites
VEE-UbAAY (SEQ ID NO: 14); VEE delivery vector with MHC class I mouse tumor
epitopes SIINFEKL (SEQ ID NO: 150) and AH1-A5 inserted
VEE-Luciferase (SEQ ID NO: 15); VEE delivery vector with luciferase gene
inserted at 7545
ubiquitin (SEQ ID NO: 38) > UbG76 0-228
Ubiquitin A76 (SEQ ID NO: 39) > UbA76 0-228
HLA-A2 (MHC class I) signal peptide (SEQ ID NO: 40) > MHC SignalPep 0-78
HLA-A2 (MHC class I) Trans Membrane domain (SEQ ID NO: 41) > HLA A2 TM Domain
0-201
IgK Leader Seq (SEQ ID NO: 42) > IgK Leader Seq 0-60
Human DC-Lamp (SEQ ID NO: 43) > HumanDCLAMP 0-3178
Mouse LAMP1 (SEQ ID NO: 44) > MouseLamp1 0-1858
Human Lamp1 cDNA (SEQ ID NO: 45) > Human Lamp1 0-2339
Tetanus toxoid nulceic acid sequence (SEQ ID NO: 46)
Tetanus toxoid amino acid sequence (SEQ ID NO: 47)
PADRE nulceotide sequence (SEQ ID NO: 48)
PADRE amino acid sequence (SEQ ID NO: 49)
WPRE (SEC ID NO: 50) > WPRE 0-593
IRES (SEQ ID NO: 51) > eGFP_IRES_SEAP_Insert 1746-2335
GFP (SEQ ID NO: 52)
SEAP (SEQ ID NO: 53)
Firefly Luciferase (SEQ ID NO: 54)
FMDV 2A (SEQ ID NO: 55)
Tremelimumab VL (SEQ ID NO: 16)
Tremelimumab VH (SEQ ID NO: 17)
Tremelimumab VH CDR1 (SEQ ID NO: 18)
Tremelimumab VH CDR2 (SEQ ID NO: 19)
Tremelimumab VH CDR3 (SEQ ID NO: 20)
Tremelimumab VL CDR1 (SEQ ID NO: 21)
Tremelimumab VL CDR2 (SEQ ID NO: 22)
Tremelimumab VL CDR3 (SEQ ID NO: 23)
Durvalumab (MEDI4736) VL (SEQ ID NO: 24)
MEDI4736 VH (SEQ ID NO: 25)
MEDI4736 VH CDR1 (SEQ ID NO: 26)
MEDI4736 VH CDR2 (SEQ ID NO: 27)
MEDI4736 VH CDR3 (SEQ ID NO: 28)
MEDI4736 VL CDR1 (SEQ ID NO: 29)
MEDI4736 VL CDR2 (SEQ ID NO: 30)
MEDI4736 VL CDR3 (SEQ ID NO: 31)
UbA76-25merPDTT nucleotide (SEQ ID NO: 32)
UbA76-25merPDTT polypeptide (SEQ ID NO: 33)
MAG-25merPDTT nucleotide (SEQ ID NO: 34)
MAG-25merPDTT polypeptide (SEQ ID NO: 35)
Ub7625merPDTT_NoSFL nucleotide (SEQ ID NO: 36)
Ub7625merPDTT_NoSFL polypeptide (SEQ ID NO: 37)
ChAdV68.5WTnt.MAG25mer (SEQ ID NO: 2); AC_000011.1 with E1 (nt 577 to 3403)
and E3 (nt 27,125-31,825) sequences deleted; corresponding ATCC VR-594
nucleotides substituted at five positions; model antigen cassette under
the control of the CMV promoter/enhancer inserted in place of deleted E1;
SV40 polyA 3′ of cassette
Venezuelan equine encephalitis virus [VEE] (SEQ ID NO: 3) GenBank: L01442.2
VEE-MAG25mer (SEQ ID NO: 4); contains MAG-25merPDTT nucleotide (bases 30-1755)
Venezuelan equine encephalitis virus strain TC-83 [TC-83] (SEQ ID NO: 5)
GenBank: L01443.1
VEE Delivery Vector (SEQ ID NO: 6); VEE genome with nucleotides 7544-11175
deleted [alphavirus structural proteins removed]
TC-83 Delivery Vector (SEQ ID NO: 7); TC-83 genome with nucleotides 7544-11175
deleted [alphavirus structural proteins removed]
VEE Production Vector (SEQ ID NO: 8); VEE genome with nucleotides 7544-11175
deleted, plus 5′ T7-promoter, plus 3′ restriction sites
TC-83 Production Vector (SEQ ID NO: 9); TC-83 genome with nucleotides 7544-11175
deleted, plus 5′ T7-promoter, plus 3′ restriction sites
VEE-UbAAY (SEQ ID NO: 14); VEE delivery vector with MHC class I mouse tumor
epitopes SIINFEKL and AH1-A5 inserted
VEE-Luciferase (SEQ ID NO: 15); VEE delivery vector with luciferase gene
inserted at 7545
ubiquitin (SEQ ID NO: 38) > UbG76 0-228
Ubiquitin A76 (SEQ ID NO: 39) > UbA76 0-228
HLA-A2 (MHC class I) signal peptide (SEQ ID NO: 40) > MHC SignalPep 0-78
HLA-A2 (MHC class I) Trans Membrane domain (SEQ ID NO: 41) > HLA A2 TM Domain
0-201
IgK Leader Seq (SEQ ID NO: 42) > IgK Leader Seq 0-60
Human DC-Lamp (SEQ ID NO: 43) > HumanDCLAMP 0-3178
Mouse LAMP1 (SEQ ID NO: 44) > MouseLamp1 0-1858
Human Lamp1 cDNA (SEQ ID NO: 45) > Human Lamp1 0-2339
Tetanus toxoid nulceic acid sequence (SEQ ID NO: 46)
Tetanus toxoid amino acid sequence (SEQ ID NO: 47)
PADRE nulceotide sequence (SEQ ID NO: 48)
PADRE amino acid sequence (SEQ ID NO: 49)
WPRE (SEQ ID NO: 50) > WPRE 0-593
IRES (SEQ ID NO: 51) > eGFP_IRES_SEAP_Insert 1746-2335
GFP (SEQ ID NO: 52)
SEAP (SEQ ID NO: 53)
Firefly Luciferase (SEQ ID NO: 54)
FMDV 2A (SEQ ID NO: 55)

### REFERENCES

[0794] 1. Desrichard, A., Snyder, A. & Chan, T. A. Cancer Neoantigens and Applications for Immunotherapy. Clin. Cancer Res. Off. J. Am. Assoc. Cancer Res. (2015). doi: 10.1158/1078-0432. CCR-14-3175
[0795] 2. Schumacher, T. N. & Schreiber, R. D. Neoantigens in cancer immunotherapy. Science 348, 69-74 (2015).
[0796] 3. Gubin, M. M., Artyomov, M. N., Mardis, E. R. & Schreiber, R. D. Tumor neoantigens: building a framework for personalized cancer immunotherapy. J. Clin. Invest. 125, 3413-3421 (2015).
[0797] 4. Rizvi, N. A. et al. Cancer immunology. Mutational landscape determines sensitivity to PD-1 blockade in non-small cell lung cancer. Science 348, 124-128 (2015).
[0798] 5. Snyder, A. et al. Genetic basis for clinical response to CTLA-4 blockade in melanoma. N Engl. J. Med. 371, 2189-2199 (2014).
[0799] 6. Carreno, B. M. et al. Cancer immunotherapy. A dendritic cell vaccine increases the breadth and diversity of melanoma neoantigen-specific T cells. Science 348, 803-808 (2015).
[0800] 7. Tran, E. et al. Cancer immunotherapy based on mutation-specific CD4+ T cells in a patient with epithelial cancer. Science 344, 641-645 (2014).
[0801] 8. Hacohen, N. & Wu, C. J.-Y. United States Patent Application: 20110293637-COMPOSITIONS AND METHODS OF IDENTIFYING TUMOR SPECIFIC NEOANTIGENS. (A1). at <http://appft1.uspto.gov/netacgi/nph-Parser?Sect1=PTO1&Sect2=HITOFF&d=PG01&p=1&u=/netahtml/PTO/srchnum.html&r=1& f=G&l=50&s1=20110293637.PGNR.>
[0802] 9. Lundegaard, C., Hoof, I., Lund, 0. & Nielsen, M. State of the art and challenges in sequence based T-cell epitope prediction. Immunome Res. 6 Suppl 2, S3 (2010).
[0803] 10. Yadav, M. et al. Predicting immunogenic tumour mutations by combining mass spectrometry and exome sequencing. Nature 515, 572-576 (2014).
[0804] 11. Bassani-Sternberg, M., Pletscher-Frankild, S., Jensen, L. J. & Mann, M. Mass spectrometry of human leukocyte antigen class I peptidomes reveals strong effects of protein abundance and turnover on antigen presentation. Mol. Cell. Proteomics MCP 14, 658-673 (2015).
[0805] 12. Van Allen, E. M. et al. Genomic correlates of response to CTLA-4 blockade in metastatic melanoma. Science 350, 207-211 (2015).
[0806] 13. Yoshida, K. & Ogawa, S. Splicing factor mutations and cancer. Wiley Interdiscip. Rev. RNA 5, 445-459 (2014).
[0807] 14. Cancer Genome Atlas Research Network. Comprehensive molecular profiling of lung adenocarcinoma. Nature 511, 543-550 (2014).
[0808] 15. Rajasagi, M. et al. Systematic identification of personal tumor-specific neoantigens in chronic lymphocytic leukemia. Blood 124, 453-462 (2014).
[0809] 16. Downing, S. R. et al. U.S. Patent Application 0120208706—OPTIMIZATION OF MULTIGENE ANALYSIS OF TUMOR SAMPLES. (A1). at <http://appft1.uspto.gov/netacgi/nph-Parser?Sect1=PTO1&Sect2=HITOFF&d=PG01&p=1&u=*netahtml/PTO/srchnum.html&r=1& f=G&l=50&s1=20120208706.PGNR.>
[0810] 17. Target Capture for NextGen Sequencing—IDT. at <http://www.idtdna.com/pages/products/nextgen/target-capture>
[0811] 18. Shukla, S. A. et al. Comprehensive analysis of cancer-associated somatic mutations in class I HLA genes. Nat. Biotechnol. 33, 1152-1158 (2015).
[0812] 19. Cieslik, M. et al. The use of exome capture RNA-seq for highly degraded RNA with application to clinical cancer sequencing. Genome Res. 25, 1372-1381 (2015).
[0813] 20. Bodini, M. et al. The hidden genomic landscape of acute myeloid leukemia: subclonal structure revealed by undetected mutations. Blood 125, 600-605 (2015).
[0814] 21. Saunders, C. T. et al. Strelka: accurate somatic small-variant calling from sequenced tumor-normal sample pairs. Bioinforma. Oxf. Engl. 28, 1811-1817 (2012).
[0815] 22. Cibulskis, K. et al. Sensitive detection of somatic point mutations in impure and heterogeneous cancer samples. Nat. Biotechnol. 31, 213-219 (2013).
[0816] 23. Wilkerson, M. D. et al. Integrated RNA and DNA sequencing improves mutation detection in low purity tumors. Nucleic Acids Res. 42, e107 (2014).
[0817] 24. Mose, L. E., Wilkerson, M. D., Hayes, D. N., Perou, C. M. & Parker, J. S. ABRA: improved coding indel detection via assembly-based realignment. Bioinforma. Oxf. Engl. 30, 2813-2815 (2014).
[0818] 25. Ye, K., Schulz, M. H., Long, Q., Apweiler, R. & Ning, Z. Pindel: a pattern growth approach to detect break points of large deletions and medium sized insertions from paired-end short reads. Bioinforma. Oxf. Engl. 25, 2865-2871 (2009).
[0819] 26. Lam, H. Y. K. et al. Nucleotide-resolution analysis of structural variants using BreakSeq and a breakpoint library. Nat. Biotechnol. 28, 47-55 (2010).
[0820] 27. Frampton, G. M. et al. Development and validation of a clinical cancer genomic profiling test based on massively parallel DNA sequencing. Nat. Biotechnol. 31, 1023-1031 (2013).
[0821] 28. Boegel, S. et al. HLA typing from RNA-Seq sequence reads. Genome Med. 4, 102 (2012).
[0822] 29. Liu, C. et al. ATHLATES: accurate typing of human leukocyte antigen through exome sequencing. Nucleic Acids Res. 41, e142 (2013).
[0823] 30. Mayor, N. P. et al. HLA Typing for the Next Generation. PloS One 10, e0127153 (2015).
[0824] 31. Roy, C. K., Olson, S., Graveley, B. R., Zamore, P. D. & Moore, M. J. Assessing long-distance RNA sequence connectivity via RNA-templated DNA-DNA ligation. eLife 4, (2015).
[0825] 32. Song, L. & Florea, L. CLASS: constrained transcript assembly of RNA-seq reads. BMC Bioinformatics 14 Suppl 5, S14 (2013).
[0826] 33. Maretty, L., Sibbesen, J. A. & Krogh, A. Bayesian transcriptome assembly. Genome Biol. 15, 501 (2014).
[0827] 34. Pertea, M. et al. StringTie enables improved reconstruction of a transcriptome from RNA-seq reads. Nat. Biotechnol. 33, 290-295 (2015).
[0828] 35. Roberts, A., Pimentel, H., Trapnell, C. & Pachter, L. Identification of novel transcripts in annotated genomes using RNA-Seq. Bioinforma. Oxf. Engl. (2011). doi:10.1093/bioinformatics/btr355
[0829] 36. Vitting-Seerup, K., Porse, B. T., Sandelin, A. & Waage, J. spliceR: an R package for classification of alternative splicing and prediction of coding potential from RNA-seq data. BMC Bioinformatics 15, 81 (2014).
[0830] 37. Rivas, M. A. et al. Human genomics. Effect of predicted protein-truncating genetic variants on the human transcriptome. Science 348, 666-669 (2015).
[0831] 38. Skelly, D. A., Johansson, M., Madeoy, J., Wakefield, J. & Akey, J. M. A powerful and flexible statistical framework for testing hypotheses of allele-specific gene expression from RNA-seq data. Genome Res. 21, 1728-1737 (2011).
[0832] 39. Anders, S., Pyl, P. T. & Huber, W. HTSeq—a Python framework to work with high-throughput sequencing data. Bioinforma. Oxf. Engl. 31, 166-169 (2015).
[0833] 40. Furney, S. J. et al. SF3B1 mutations are associated with alternative splicing in uveal melanoma. Cancer Discov. (2013). doi:10.1158/2159-8290.CD-13-0330
[0834] 41. Zhou, Q. et al. A chemical genetics approach for the functional assessment of novel cancer genes. Cancer Res. (2015). doi:10.1158/0008-5472.CAN-14-2930
[0835] 42. Maguire, S. L. et al. SF3B1 mutations constitute a novel therapeutic target in breast cancer. J. Pathol. 235, 571-580 (2015).
[0836] 43. Carithers, L. J. et al. A Novel Approach to High-Quality Postmortem Tissue Procurement: The GTEx Project. Biopreservation Biobanking 13, 311-319 (2015).
[0837] 44. Xu, G. et al. RNA CoMPASS: a dual approach for pathogen and host transcriptome analysis of RNA-seq datasets. PloS One 9, e89445 (2014).
[0838] 45. Andreatta, M. & Nielsen, M. Gapped sequence alignment using artificial neural networks: application to the MHC class I system. Bioinforma. Oxf. Engl. (2015). doi:10.1093/bioinformatics/btv639
[0839] 46. Jorgensen, K. W., Rasmussen, M., Buus, S. & Nielsen, M. NetMHCstab-predicting stability of peptide-MHC-I complexes; impacts for cytotoxic T lymphocyte epitope discovery. Immunology 141, 18-26 (2014).
[0840] 47. Larsen, M. V. et al. An integrative approach to CTL epitope prediction: a combined algorithm integrating MHC class I binding, TAP transport efficiency, and proteasomal cleavage predictions. Eur. J. Immunol. 35, 2295-2303 (2005).
[0841] 48. Nielsen, M., Lundegaard, C., Lund, O. & Kemlir, C. The role of the proteasome in generating cytotoxic T-cell epitopes: insights obtained from improved predictions of proteasomal cleavage. Immunogenetics 57, 33-41 (2005).
[0842] 49. Boisvert, F.-M. et al. A Quantitative Spatial Proteomics Analysis of Proteome Turnover in Human Cells. Mol. Cell. Proteomics 11, M111.011429-M111.011429 (2012).
[0843] 50. Duan, F. et al. Genomic and bioinformatic profiling of mutational neoepitopes reveals new rules to predict anticancer immunogenicity. J. Exp. Med. 211, 2231-2248 (2014).
[0844] 51. Janeway's Immunobiology: 9780815345312: Medicine & Health Science Books @ Amazon.com. at <http://www.amazon.com/Janeways-Immunobiology-Kenneth-Murphy/dp/0815345313>
[0845] 52. Calis, J. J. A. et al. Properties of MHC Class I Presented Peptides That Enhance Immunogenicity. PLoS Comput. Biol. 9, e1003266 (2013).
[0846] 53. Zhang, J. et al. Intratumor heterogeneity in localized lung adenocarcinomas delineated by multiregion sequencing. Science 346, 256-259 (2014)
[0847] 54. Walter, M. J. et al. Clonal architecture of secondary acute myeloid leukemia. N Engl. J. Med. 366, 1090-1098 (2012).
[0848] 55. Hunt D F, Henderson R A, Shabanowitz J, Sakaguchi K, Michel H, Sevilir N, Cox A L, Appella E, Engelhard V H. Characterization of peptides bound to the class I MHC molecule HLA-A2.1 by mass spectrometry. Science 1992. 255: 1261-1263.
[0849] 56. Zarling A L, Polefrone J M, Evans A M, Mikesh L M, Shabanowitz J, Lewis S T, Engelhard V H, Hunt D F. Identification of class I MHC-associated phosphopeptides as targets for cancer immunotherapy. Proc Natl Acad Sci USA. 2006 Oct. 3; 103(40):14889-94.
[0850] 57. Bassani-Sternberg M, Pletscher-Frankild S, Jensen L J, Mann M. Mass spectrometry of human leukocyte antigen class I peptidomes reveals strong effects of protein abundance and turnover on antigen presentation. Mol Cell Proteomics. 2015 March; 14(3):658-73. doi: 10.1074/mcp.M114.042812.
[0851] 58. Abelin J G, Trantham P D, Penny S A, Patterson A M, Ward S T, Hildebrand W H, Cobbold M, Bai D L, Shabanowitz J, Hunt D F. Complementary IMAC enrichment methods for HLA-associated phosphopeptide identification by mass spectrometry. Nat Protoc. 2015 September; 10(9):1308-18. doi: 10.1038/nprot.2015.086. Epub 2015 Aug. 6
[0852] 59. Barnstable C J, Bodmer W F, Brown G, Galfre G, Milstein C, Williams A F, Ziegler A. Production of monoclonal antibodies to group A erythrocytes, HLA and other human cell surface antigens-new tools for genetic analysis. Cell. 1978 May; 14(1):9-20.
[0853] 60. Goldman J M, Hibbin J, Kearney L, Orchard K, Th′ng KH. HLA-DR monoclonal antibodies inhibit the proliferation of normal and chronic granulocytic leukaemia myeloid progenitor cells. Br J Haematol. 1982 November; 52(3):411-20.
[0854] 61. Eng J K, Jahan T A, Hoopmann M R. Comet: an open-source MS/MS sequence database search tool. Proteomics. 2013 January; 13(1):22-4. doi: 10.1002/pmic.201200439. Epub 2012 Dec. 4.
[0855] 62. Eng J K, Hoopmann M R, Jahan T A, Egertson J D, Noble W S, MacCoss M J. A deeper look into Comet—implementation and features. J Am Soc Mass Spectrom. 2015 November; 26(11):1865-74. doi: 10.1007/s13361-015-1179-x. Epub 2015 Jun. 27.
[0856] 63. Lukas Käll, Jesse Canterbury, Jason Weston, William Stafford Noble and Michael J. MacCoss. Semi-supervised learning for peptide identification from shotgun proteomics datasets. Nature Methods 4:923-925, November 2007
[0857] 64. Lukas Kali, John D. Storey, Michael J. MacCoss and William Stafford Noble. Assigning confidence measures to peptides identified by tandem mass spectrometry. Journal of Proteome Research, 7(1):29-34, January 2008
[0858] 65. Lukas Käll, John D. Storey and William Stafford Noble. Nonparametric estimation of posterior error probabilities associated with peptides identified by tandem mass spectrometry. Bioinformatics, 24(16):i42-i48, August 2008
[0859] 66. Kinney R M, B J Johnson, V L Brown, D W Trent. Nucleotide Sequence of the 26 S mRNA of the Virulent Trinidad Donkey Strain of Venezuelan Equine Encephalitis Virus and Deduced Sequence of the Encoded Structural Proteins. Virology 152 (2), 400-413. 1986 Jul. 30.
[0860] 67. Jill E Slansky, Frederique M Rattis, Lisa F Boyd, Tarek Fahmy, Elizabeth M Jaffee, Jonathan P Schneck, David H Margulies, Drew M Pardoll. Enhanced Antigen-Specific Antitumor Immunity with Altered Peptide Ligands that Stabilize the MHC-Peptide-TCR Complex. Immunity, Volume 13, Issue 4, 1 Oct. 2000, Pages 529-538.
[0861] 68. A Y Huang, P H Gulden, A S Woods, M C Thomas, C D Tong, W Wang, V H Engelhard, G Pasternack, R Cotter, D Hunt, D M Pardoll, and E M Jaffee. The immunodominant major histocompatibility complex class I-restricted antigen of a murine colon tumor derives from an endogenous retroviral gene product. Proc Natl Acad Sci USA; 93(18): 9730-9735, 1996 Sep. 3.
[0862] 69. JOHNSON, BARBARA J. B., RICHARD M. KINNEY, CRYSTLE L. KOST AND DENNIS W. TRENT. Molecular Determinants of Alphavirus Neurovirulence: Nucleotide and Deduced Protein Sequence Changes during Attenuation of Venezuelan Equine Encephalitis Virus. J Gen Virol 67:1951-1960, 1986.
[0863] 70. Aarnoudse, C. A., Kruse, M., Konopitzky, R., Brouwenstijn, N., and Schrier, P. I. (2002). TCR reconstitution in Jurkat reporter cells facilitates the identification of novel tumor antigens by cDNA expression cloning. Int J Cancer 99, 7-13.
[0864] 71. Alexander, J., Sidney, J., Southwood, S., Ruppert, J., Oseroff, C., Maewal, A., Snoke, K., Serra, H. M., Kubo, R. T., and Sette, A. (1994). Development of high potency universal DR-restricted helper epitopes by modification of high affinity DR-blocking peptides. Immunity 1, 751-761.
[0865] 72. Banu, N., Chia, A., Ho, Z. Z., Garcia, A. T., Paravasivam, K., Grotenbreg, G. M., Bertoletti, A., and Gehring, A. J. (2014). Building and optimizing a virus-specific T cell receptor library for targeted immunotherapy in viral infections. Scientific Reports 4, 4166.
[0866] 73. Cornet, S., Miconnet, I., Menez, J., Lemonnier, F., and Kosmatopoulos, K. (2006). Optimal organization of a polypeptide-based candidate cancer vaccine composed of cryptic tumor peptides with enhanced immunogenicity. Vaccine 24, 2102-2109.
[0867] 74. Depla, E., van der Aa, A., Livingston, B. D., Crimi, C., Allosery, K., de Brabandere, V., Krakover, J., Murthy, S., Huang, M., Power, S., et al. (2008). Rational design of a multiepitope vaccine encoding T-lymphocyte epitopes for treatment of chronic hepatitis B virus infections. Journal of Virology 82, 435-450.
[0868] 75. Ishioka, G. Y., Fikes, J., Hermanson, G., Livingston, B., Crimi, C., Qin, M., del Guercio, M. F., Oseroff, C., Dahlberg, C., Alexander, J., et al. (1999). Utilization of MHC class I transgenic mice for development of minigene DNA vaccines encoding multiple HLA-restricted CTL epitopes. J Immunol 162, 3915-3925.
[0869] 76. Janetzki, S., Price, L., Schroeder, H., Britten, C. M., Welters, M. J. P., and Hoos, A. (2015). Guidelines for the automated evaluation of Elispot assays. Nat Protoc 10, 1098-1115.
[0870] 77. Lyons, G. E., Moore, T., Brasic, N., Li, M., Roszkowski, J. J., and Nishimura, M. I. (2006). Influence of human CD8 on antigen recognition by T-cell receptor-transduced cells. Cancer Res 66, 11455-11461.
[0871] 78. Nagai, K., Ochi, T., Fujiwara, H., An, J., Shirakata, T., Mineno, J., Kuzushima, K., Shiku, H., Melenhorst, J. J., Gostick, E., et al. (2012). Aurora kinase A-specific T-cell receptor gene transfer redirects T lymphocytes to display effective antileukemia reactivity. Blood 119, 368-376.
[0872] 79. Panina-Bordignon, P., Tan, A., Termijtelen, A., Demotz, S., Corradin, G., and Lanzavecchia, A. (1989). Universally immunogenic T cell epitopes: promiscuous binding to human MHC class II and promiscuous recognition by T cells. Eur J Immunol 19, 2237-2242.
[0873] 80. Vitiello, A., Marchesini, D., Furze, J., Sherman, L. A., and Chesnut, R. W. (1991). Analysis of the HLA-restricted influenza-specific cytotoxic T lymphocyte response in transgenic mice carrying a chimeric human-mouse class I major histocompatibility complex. J Exp Med 173, 1007-1015.
[0874] 81. Yachi, P. P., Ampudia, J., Zal, T., and Gascoigne, N. R. J. (2006). Altered peptide ligands induce delayed CD8-T cell receptor interaction—a role for CD8 in distinguishing antigen quality. Immunity 25, 203-211.
[0875] 82. Pushko P, Parker M, Ludwig G V, Davis N L, Johnston R E, Smith J F. Replicon-helper systems from attenuated Venezuelan equine encephalitis virus: expression of heterologous genes in vitro and immunization against heterologous pathogens in vivo. Virology. 1997 Dec. 22; 239(2):389-401.
[0876] 83. Strauss, J H and E G Strauss. The alphaviruses: gene expression, replication, and evolution. Microbiol Rev. 1994 September; 58(3): 491-562.
[0877] 84. Rheme C, Ehrengruber M U, Grandgirard D. Alphaviral cytotoxicity and its implication in vector development. Exp Physiol. 2005 January; 90(1):45-52. Epub 2004 Nov. 12.
[0878] 85. Riley, Michael K. II, and Wilfred Vermerris. Recent Advances in Nanomaterials for Gene Delivery-A Review. Nanomaterials 2017, 7(5), 94.
[0879] 86. Frolov I, Hardy R, Rice C M. Cis-acting RNA elements at the 5′ end of Sindbis virus genome RNA regulate minus- and plus-strand RNA synthesis. RNA. 2001 November; 7(11):1638-51.
[0880] 87. Jose J, Snyder J E, Kuhn R J. A structural and functional perspective of alphavirus replication and assembly. Future Microbiol. 2009 September; 4(7):837-56.
[0881] 88. Bo Li and C. olin N. Dewey. RSEM: accurate transcript quantification from RNA-Seq data with or without a referenfe genome. BMC Bioinformatics, 12:323, August 2011
[0882] 89. Hillary Pearson, Tariq Daouda, Diana Paola Granados, Chantal Durette, Eric Bonneil, Mathieu Courcelles, Anja Rodenbrock, Jean-Philippe Laverdure, Caroline Côté, Sylvie Mader, Sébastien Lemieux, Pierre Thibault, and Claude Perreault. MHC class I-associated peptides derive from selective regions of the human genome. The Journal of Clinical Investigation, 2016,
[0883] 90. Juliane Liepe, Fabio Marino, John Sidney, Anita Jeko, Daniel E. Bunting, Alessandro Sette, Peter M. Kloetzel, Michael P. H. Stumpf, Albert J. R. Heck, Michele Mishto. A large fraction of HLA class I ligands are proteasome-generated spliced peptides. Science, 21, October 2016.
[0884] 91. Mommen G P., Marino, F., Meiring H D., Poelen, M C., van Gaans-van den Brink, J A., Mohammed S., Heck A J., and van Els C A. Sampling From the Proteome to the Human Leukocyte Antigen-DR (HLA-DR) Ligandome Proceeds Via High Specificity. Mol Cell Proteomics 15(4): 1412-1423, April 2016.
[0885] 92. Sebastian Kreiter, Mathias Vormehr, Niels van de Roemer, Mustafa Diken, Martin Löwer, Jan Diekmann, Sebastian Boegel, Barbara Schrörs, Fulvia Vascotto, John C. Castle, Arbel D. Tadmor, Stephen P. Schoenberger, Christoph Huber, Özlem Tütreci, and Ugur Sahin. Mutant MHC class II epitopes drive therapeutic immune responses to caner. Nature 520, 692-696, April 2015.
[0886] 93. Tran E., Turcotte S., Gros A., Robbins P. F., Lu Y. C., Dudley M. E., Wunderlich J. R., Somerville R. P., Hogan K., Hinrichs C. S., Parkhurst M. R., Yang J. C., Rosenberg S. A. Cancer immunotherapy based on mutation-specific CD4+ T cells in a patient with epithelial cancer. Science 344(6184) 641-645, May 2014.
[0887] 94. Andreatta M., Karosiene E., Rasmussen M., Stryhn A., Buus S., Nielsen M. Accurate pan-specific prediction of peptide-MHC class II binding affinity with improved binding core identification. Immunogenetics 67(11-12) 641-650, November 2015.
[0888] 95. Nielsen, M., Lund, O. NN-align. An artificial neural network-based alignment algorithm for MHC class II peptide binding prediction. BMC Bioinformatics 10:296, September 2009.
[0889] 96. Nielsen, M., Lundegaard, C., Lund, O. Prediction of MHC class II binding affinity using SMM-align, a novel stabilization matrix alignment method. BMC Bioinformatics 8:238, July 2007.
[0890] 97. Zhang, J., et al. PEAKS DB: de novo sequencing assisted database search for sensitive and accurate peptide identification. Molecular & Cellular Proteomics. 11(4):1-8. Jan. 2, 2012.
[0891] 98. Jensen, Kamilla Kjaergaard, et al. “Improved Methods for Prediting Peptide Binding Affinity to MHC Class II Molecules.” Immunology, 2018, doi:10.1111/imm.12889.
[0892] 99. Carter, S. L., Cibulskis, K., Heiman, E., McKenna, A., Shen, H., Zack, T., Laird, P. W., Onofrio, R. C., Winckler, W., Weir, B. A., et al. (2012). Absolute quantification of somatic DNA alterations in human cancer. Nat. Biotechnol. 30, 413-421
[0893] 100. McGranahan, N., Rosenthal, R., Hiley, C. T., Rowan, A. J., Watkins, T. B. K., Wilson, G. A., Birkbak, N.J., Veeriah, S., Van Loo, P., Herrero, J., et al. (2017). Allele-Specific HLA Loss and Immune Escape in Lung Cancer Evolution. Cell 171, 1259-1271.e11.
[0894] 101. Shukla, S. A., Rooney, M. S., Rajasagi, M., Tiao, G., Dixon, P. M., Lawrence, M. S., Stevens, J., Lane, W. J., Dellagatta, J. L., Steelman, S., et al. (2015). Comprehensive analysis of cancer-associated somatic mutations in class I HLA genes. Nat. Biotechnol. 33, 1152-1158.
[0895] 102. Van Loo, P., Nordgard, S. H., Lingjærde, O. C., Russnes, H. G., Rye, I. H., Sun, W., Weigman, V. J., Marynen, P., Zetterberg, A., Naume, B., et al. (2010). Allele-specific copy number analysis of tumors. Proc. Natl. Acad. Sci. U.S.A 107, 16910-16915.
[0896] 103. Van Loo, P., Nordgard, S. H., Lingjærde, O. C., Russnes, H. G., Rye, I. H., Sun, W., Weigman, V. J., Marynen, P., Zetterberg, A., Naume, B., et al. (2010). Allele-specific copy number analysis of tumors. Proc. Natl. Acad. Sci. U.S.A 107, 16910-16915.
[0897] 104. HIV Sequence Compendium 2018 Foley B, Leitner T, Apetrei C, Hahn B, Mizrachi I, Mullins J, Rambaut A, Wolinsky S, and Korber B, Eds. Published by Theoretical Biology and Biophysics Group, Los Alamos National Laboratory, NM, LA-UR 18-25673.
[0898] 105. Llano, A., Williams, A., Olvera, A., Silva-Arrieta, S., Brander, C., (2013). Best-Characterized HIV-1 CTL Epitopes: The 2013 Update. HIV MolecularImmunology, 3-25.
[0899] 106. Gaiha, G., Rossin, E., Urbach, J., et al. (2019). Structural topology defines protective CD8+ T cell epitopes in the HIV proteome. Science 364, 480-484.
[0900] 107. O'Donnell, T. J., Rubinsteyn, A., Bonsack, M., Riemer, A. B., Laserson, U., & Hammerbacher, J. (2018). MHCflurry: Open-Source Class I MHC Binding Affinity Prediction. Cell Systems, 7(1), 129-132.e4.
[0901] 108. Los Almos National Security, LLC, “Best-defined CTL/CD8+ Epitope Summary”, 20 Nov. 2019, https://www.hiv.1an1.gov/content/immunology/tables/optimal_ctl_surnmary.html.
[0902] 109. Llano A, Cedeño, S, Silva-Arrieta, S, Brander C (2019). The 2019 Optimal HIV CTL epitopes update: Growing diversity in epitope length and HLA restriction. in HIV Molecular Immunology 2019. Yusim, K, Korber B, Brander, C, Barouch, D, de Boer, R, Haynes, B F, Koup, R, Moore, J P, Walker, B D, Eds. Published by Theoretical Biology and Biophysics Group, Los Alamos National Laboratory, Los Alamos, N. Mex.

Lengthy table referenced here
US20220265812A1-20220825-T00001
Please refer to the end of the specification for access instructions.

Lengthy table referenced here
US20220265812A1-20220825-T00002
Please refer to the end of the specification for access instructions.

Lengthy table referenced here
US20220265812A1-20220825-T00003
Please refer to the end of the specification for access instructions.

Lengthy table referenced here
US20220265812A1-20220825-T00004
Please refer to the end of the specification for access instructions.

Lengthy table referenced here
US20220265812A1-20220825-T00005
Please refer to the end of the specification for access instructions.

Lengthy table referenced here
US20220265812A1-20220825-T00006
Please refer to the end of the specification for access instructions.

Lengthy table referenced here
US20220265812A1-20220825-T00007
Please refer to the end of the specification for access instructions.

Lengthy table referenced here
US20220265812A1-20220825-T00008
Please refer to the end of the specification for access instructions.

Lengthy table referenced here
US20220265812A1-20220825-T00009
Please refer to the end of the specification for access instructions.

Lengthy table referenced here
US20220265812A1-20220825-T00010
Please refer to the end of the specification for access instructions.

Lengthy table referenced here
US20220265812A1-20220825-T00011
Please refer to the end of the specification for access instructions.

LENGTHY TABLES
The patent application contains a lengthy table section. A copy of the table is available in electronic form from the USPTO web site (https://seqdata.uspto.gov/?pageRequest=docDetail&DocID=US20220265812A1). An electronic copy of the table will also be available from the USPTO upon request and payment of the fee set forth in 37 CFR 1.19(b)(3).

What is claimed is:

1. A composition for delivery of an antigen expression system, the antigen expression system comprising:
a vector backbone comprising a chimpanzee adenovirus vector, optionally wherein the chimpanzee adenovirus vector is a ChAdV68 vector, or an alphavirus vector, optionally wherein the alphavirus vector is a Venezuelan equine encephalitis virus vector, the vector backbone comprising at least one HIV MHC class I antigen-encoding nucleic acid sequence comprising a MHC class I epitope encoding nucleic acid sequence, optionally wherein the MHC class I epitope encoding nucleic acid sequence encodes a MHC class I epitope comprising at least one HIV epitope selected from the group consisting of the sequences shown in SEQ ID NOs: 325-22349.

2. The composition of claim 1, wherein the at least one HIV epitope is selected from the group consisting of the sequences shown in SEQ ID NOs: 4113, 4114, 4115, 4427, 4439, 4494, 4495, 4545, 4561, 4956, 4968, 4975, 4982, 5259, 5261, 5459, 5460, 5610, 5643, and 5661.

3. The composition of claim 1 or 2, wherein the antigen expression system comprises 2, 3, 4, 5, 6, 7, 8, 9, 10, 11, 12, 13, 14, 15, 16, 17, 18, 19, or 20 HIV MHC class I antigen-encoding nucleic acid sequences, wherein each HIV MHC class I antigen-encoding nucleic acid sequence comprises a MHC class I epitope encoding nucleic acid sequence that encodes a MHC class I epitope comprising at least one HIV epitope selected from the group consisting of the sequences shown in SEQ ID Nos: 325-22349.

4. The composition of claim 3, wherein each HIV MHC class I antigen-encoding nucleic acid sequence comprises a MHC class I epitope encoding nucleic acid sequence that encodes a MHC class I epitope comprising at least one HIV epitope selected from the group consisting of the sequences shown in SEQ ID NOs: 4113, 4114, 4115, 4427, 4439, 4494, 4495, 4545, 4561, 4956, 4968, 4975, 4982, 5259, 5261, 5459, 5460, 5610, 5643, and 5661.

5. A composition for delivery of one or more antigens, the composition comprising one or more HIV MHC class I antigens or one or more nucleic acid sequences encoding one or more HIV MHC class I antigens, each HIV MHC class I antigen comprising a MHC class I epitope comprising at least one HIV epitope selected from the group consisting of the sequences shown in SEQ ID Nos: 325-22349.

6. The composition of claim 5, wherein each HIV MHC class I antigen comprises a MHC class I epitope comprising at least one HIV epitope selected from the group consisting of the sequences shown in SEQ ID NOs: 4113, 4114, 4115, 4427, 4439, 4494, 4495, 4545, 4561, 4956, 4968, 4975, 4982, 5259, 5261, 5459, 5460, 5610, 5643, and 5661.

7. The composition of claim 5 or 6, wherein the composition comprises 2, 3, 4, 5, 6, 7, 8, 9, 10, 11, 12, 13, 14, 15, 16, 17, 18, 19, or 20 HIV MHC class I antigens, wherein each HIV MHC class I antigen comprises a MHC class I epitope comprising at least one HIV epitope selected from the group consisting of the sequences shown in SEQ ID Nos: 325-22349.

8. The composition of claim 7, wherein each HIV MHC class I antigen comprises a MHC class I epitope comprising at least one HIV epitope selected from the group consisting of the sequences shown in 4113, 4114, 4115, 4427, 4439, 4494, 4495, 4545, 4561, 4956, 4968, 4975, 4982, 5259, 5261, 5459, 5460, 5610, 5643, and 5661.

9. The composition of any one of claims 1-8, wherein the MHC class I epitopes are selected by performing the steps of:
(a) obtaining at least one of exome, transcriptome, or whole genome nucleotide sequencing, wherein the nucleotide sequencing data is used to obtain data representing peptide sequences of each of a set of antigens;
(b) inputting the peptide sequence of each antigen into a presentation model to generate a set of numerical likelihoods that each of the antigens is presented by one or more of the MHC proteins, the set of numerical likelihoods having been identified at least based on received mass spectrometry data; and
(c) selecting a subset of the set of antigens based on the set of numerical likelihoods to generate a set of selected antigens which are used to generate the MHC class I epitopes.

10. A composition for delivery of an antigen expression system comprising one or more vectors, the one or more vectors comprising:
(a) a vector backbone, wherein the backbone comprises:
(i) at least one promoter nucleotide sequence, and
(ii) at least one polyadenylation (poly(A)) sequence; and
(b) an antigen cassette, wherein the antigen cassette comprises:
(i) at least one antigen-encoding nucleic acid sequence, comprising:
(I) at least one HIV MHC class I antigen-encoding nucleic acid sequence, comprising:
(A) a MHC class I epitope encoding nucleic acid sequence, wherein the MHC class I epitope encoding nucleic acid sequence encodes a MHC class I epitope comprising at least one HIV epitope selected from the group consisting of the sequences shown in SEQ ID Nos: 325-22349,
(B) optionally, a 5′ linker sequence, and
(C) optionally, a 3′ linker sequence;
(ii) optionally, a second promoter nucleotide sequence operably linked to the antigen-encoding nucleic acid sequence; and
(iii) optionally, at least one MHC class II antigen-encoding nucleic acid sequence;
(iv) optionally, at least one nucleic acid sequence encoding a GPGPG (SEQ ID NO: 151) amino acid linker sequence; and
(v) optionally, at least one second poly(A) sequence, wherein the second poly(A) sequence is a native poly(A) sequence or an exogenous poly(A) sequence to the vector backbone.

11. A composition for delivery of an antigen expression system comprising one or more vectors, the one or more vectors comprising:
(a) a vector backbone, wherein the backbone comprises:
(i) at least one promoter nucleotide sequence, and
(ii) at least one polyadenylation (poly(A)) sequence; and
(b) an antigen cassette, wherein the antigen cassette comprises:
(i) at least one antigen-encoding nucleic acid sequence, comprising:
(I) at least 10, 11, 12, 13, 14, 15, 16, 17, 18, 19, or 20 HIV MHC class I antigen-encoding nucleic acid sequences linearly linked to each other, wherein each HIV MHC class I antigen-encoding nucleic acid sequence comprises a MHC class I epitope encoding nucleic acid sequence that encodes a MHC class I epitope comprising at least one HIV epitope selected from the group consisting of the sequences shown in SEQ ID NOs: 325-2165,
wherein each of the HIV MHC class I antigen-encoding nucleic acid sequences further comprises;
(A) optionally, a 5′ linker sequence, and
(B) optionally, a 3′ linker sequence;
(ii) optionally, a second promoter nucleotide sequence operably linked to the antigen-encoding nucleic acid sequence; and
(iii) optionally, at least one MHC class II antigen-encoding nucleic acid sequence;
(iv) optionally, at least one nucleic acid sequence encoding a GPGPG (SEQ ID NO: 152) amino acid linker sequence; and
(v) optionally, at least one second poly(A) sequence, wherein the second poly(A) sequence is a native poly(A) sequence or an exogenous poly(A) sequence to the vector backbone.

12. A composition for delivery of an antigen expression system comprising one or more vectors, the one or more vectors comprising:
(a) a vector backbone, wherein the backbone comprises:
(i) at least one promoter nucleotide sequence, and
(ii) at least one polyadenylation (poly(A)) sequence; and
(b) an antigen cassette, wherein the antigen cassette comprises:
(i) at least one antigen-encoding nucleic acid sequence, comprising:
(I) at least 10, 11, 12, 13, 14, 15, 16, 17, 18, 19, or 20 HIV MHC class I antigen-encoding nucleic acid sequences linearly linked to each other, wherein each HIV MHC class I antigen-encoding nucleic acid sequence comprises a MHC class I epitope encoding nucleic acid sequence that encodes a MHC class I epitope comprising at least one HIV epitope selected from the group consisting of the sequences shown in SEQ ID NOs: 2166-4106,
wherein each of the HIV MHC class I antigen-encoding nucleic acid sequences further comprises;
(A) optionally, a 5′ linker sequence, and
(B) optionally, a 3′ linker sequence;
(ii) optionally, a second promoter nucleotide sequence operably linked to the antigen-encoding nucleic acid sequence; and
(iii) optionally, at least one MHC class II antigen-encoding nucleic acid sequence;
(iv) optionally, at least one nucleic acid sequence encoding a GPGPG (SEQ ID NO: 153) amino acid linker sequence; and
(v) optionally, at least one second poly(A) sequence, wherein the second poly(A) sequence is a native poly(A) sequence or an exogenous poly(A) sequence to the vector backbone.

13. A composition for delivery of an antigen expression system comprising one or more vectors, the one or more vectors comprising:
(a) a vector backbone, wherein the backbone comprises:
(i) at least one promoter nucleotide sequence, and
(ii) at least one polyadenylation (poly(A)) sequence; and
(b) an antigen cassette, wherein the antigen cassette comprises:
(i) at least one antigen-encoding nucleic acid sequence, comprising:
(I) at least 10, 11, 12, 13, 14, 15, 16, 17, 18, 19, or 20 HIV MHC class I antigen-encoding nucleic acid sequences linearly linked to each other, wherein each HIV MHC class I antigen-encoding nucleic acid sequence comprises a MHC class I epitope encoding nucleic acid sequence that encodes a MHC class I epitope comprising at least one HIV epitope selected from the group consisting of the sequences shown in SEQ ID NOs: 4107-6241,
wherein each of the HIV MHC class I antigen-encoding nucleic acid sequences further comprises;
(A) optionally, a 5′ linker sequence, and
(B) optionally, a 3′ linker sequence;
(ii) optionally, a second promoter nucleotide sequence operably linked to the antigen-encoding nucleic acid sequence; and
(iii) optionally, at least one MHC class II antigen-encoding nucleic acid sequence;
(iv) optionally, at least one nucleic acid sequence encoding a GPGPG (SEQ ID NO: 154) amino acid linker sequence; and
(v) optionally, at least one second poly(A) sequence, wherein the second poly(A) sequence is a native poly(A) sequence or an exogenous poly(A) sequence to the vector backbone.

14. A composition for delivery of an antigen expression system comprising one or more vectors, the one or more vectors comprising:
(a) a vector backbone, wherein the backbone comprises:
(i) at least one promoter nucleotide sequence, and
(ii) at least one polyadenylation (poly(A)) sequence; and
(b) an antigen cassette, wherein the antigen cassette comprises:
(i) at least one antigen-encoding nucleic acid sequence, comprising:
(I) at least 10, 11, 12, 13, 14, 15, 16, 17, 18, 19, or 20 HIV MHC class I antigen-encoding nucleic acid sequences linearly linked to each other, wherein each HIV MHC class I antigen-encoding nucleic acid sequence comprises a MHC class I epitope encoding nucleic acid sequence that encodes a MHC class I epitope comprising at least one HIV epitope selected from the group consisting of the sequences shown in SEQ ID NOs: 6242-8389,
wherein each of the HIV MHC class I antigen-encoding nucleic acid sequences further comprises;
(A) optionally, a 5′ linker sequence, and
(B) optionally, a 3′ linker sequence;
(ii) optionally, a second promoter nucleotide sequence operably linked to the antigen-encoding nucleic acid sequence; and
(iii) optionally, at least one MHC class II antigen-encoding nucleic acid sequence;
(iv) optionally, at least one nucleic acid sequence encoding a GPGPG (SEQ ID NO: 155) amino acid linker sequence; and
(v) optionally, at least one second poly(A) sequence, wherein the second poly(A) sequence is a native poly(A) sequence or an exogenous poly(A) sequence to the vector backbone.

15. A composition for delivery of an antigen expression system comprising one or more vectors, the one or more vectors comprising:
(a) a vector backbone, wherein the backbone comprises:
(i) at least one promoter nucleotide sequence, and
(ii) at least one polyadenylation (poly(A)) sequence; and
(b) an antigen cassette, wherein the antigen cassette comprises:
(i) at least one antigen-encoding nucleic acid sequence, comprising:
(I) at least 10, 11, 12, 13, 14, 15, 16, 17, 18, 19, or 20 HIV MHC class I antigen-encoding nucleic acid sequences linearly linked to each other, wherein each HIV MHC class I antigen-encoding nucleic acid sequence comprises a MHC class I epitope encoding nucleic acid sequence that encodes a MHC class I epitope comprising at least one HIV epitope selected from the group consisting of the sequences shown in SEQ ID NOs: 8930-10626,
wherein each of the HIV MHC class I antigen-encoding nucleic acid sequences further comprises;
(A) optionally, a 5′ linker sequence, and
(B) optionally, a 3′ linker sequence;
(ii) optionally, a second promoter nucleotide sequence operably linked to the antigen-encoding nucleic acid sequence; and
(iii) optionally, at least one MHC class II antigen-encoding nucleic acid sequence;
(iv) optionally, at least one nucleic acid sequence encoding a GPGPG (SEQ ID NO: 156) amino acid linker sequence; and
(v) optionally, at least one second poly(A) sequence, wherein the second poly(A) sequence is a native poly(A) sequence or an exogenous poly(A) sequence to the vector backbone.

16. A composition for delivery of an antigen expression system comprising one or more vectors, the one or more vectors comprising:
(a) a vector backbone, wherein the backbone comprises:
(i) at least one promoter nucleotide sequence, and
(ii) at least one polyadenylation (poly(A)) sequence; and
(b) an antigen cassette, wherein the antigen cassette comprises:
(i) at least one antigen-encoding nucleic acid sequence, comprising:
(I) at least 10, 11, 12, 13, 14, 15, 16, 17, 18, 19, or 20 HIV MHC class I antigen-encoding nucleic acid sequences linearly linked to each other, wherein each HIV MHC class I antigen-encoding nucleic acid sequence comprises a MHC class I epitope encoding nucleic acid sequence that encodes a MHC class I epitope comprising at least one HIV epitope selected from the group consisting of the sequences shown in SEQ ID NOs: 10627-12810,
wherein each of the HIV MHC class I antigen-encoding nucleic acid sequences further comprises;
(A) optionally, a 5′ linker sequence, and
(B) optionally, a 3′ linker sequence;
(ii) optionally, a second promoter nucleotide sequence operably linked to the antigen-encoding nucleic acid sequence; and
(iii) optionally, at least one MHC class II antigen-encoding nucleic acid sequence;
(iv) optionally, at least one nucleic acid sequence encoding a GPGPG (SEQ ID NO: 157) amino acid linker sequence; and
(v) optionally, at least one second poly(A) sequence, wherein the second poly(A) sequence is a native poly(A) sequence or an exogenous poly(A) sequence to the vector backbone.

17. A composition for delivery of an antigen expression system comprising one or more vectors, the one or more vectors comprising:
(a) a vector backbone, wherein the backbone comprises:
(i) at least one promoter nucleotide sequence, and
(ii) at least one polyadenylation (poly(A)) sequence; and
(b) an antigen cassette, wherein the antigen cassette comprises:
(i) at least one antigen-encoding nucleic acid sequence, comprising:
(I) at least 10, 11, 12, 13, 14, 15, 16, 17, 18, 19, or 20 HIV MHC class I antigen-encoding nucleic acid sequences linearly linked to each other, wherein each HIV MHC class I antigen-encoding nucleic acid sequence comprises a MHC class I epitope encoding nucleic acid sequence that encodes a MHC class I epitope comprising at least one HIV epitope selected from the group consisting of the sequences shown in SEQ ID NOs: 12811-15079,
wherein each of the HIV MHC class I antigen-encoding nucleic acid sequences further comprises;
(A) optionally, a 5′ linker sequence, and
(B) optionally, a 3′ linker sequence;
(ii) optionally, a second promoter nucleotide sequence operably linked to the antigen-encoding nucleic acid sequence; and
(iii) optionally, at least one MHC class II antigen-encoding nucleic acid sequence;
(iv) optionally, at least one nucleic acid sequence encoding a GPGPG (SEQ ID NO: 158) amino acid linker sequence; and
(v) optionally, at least one second poly(A) sequence, wherein the second poly(A) sequence is a native poly(A) sequence or an exogenous poly(A) sequence to the vector backbone.

18. A composition for delivery of an antigen expression system comprising one or more vectors, the one or more vectors comprising:
(a) a vector backbone, wherein the backbone comprises:
(i) at least one promoter nucleotide sequence, and
(ii) at least one polyadenylation (poly(A)) sequence; and
(b) an antigen cassette, wherein the antigen cassette comprises:
(i) at least one antigen-encoding nucleic acid sequence, comprising:
(I) at least 10, 11, 12, 13, 14, 15, 16, 17, 18, 19, or 20 HIV MHC class I antigen-encoding nucleic acid sequences linearly linked to each other, wherein each HIV MHC class I antigen-encoding nucleic acid sequence comprises a MHC class I epitope encoding nucleic acid sequence that encodes a MHC class I epitope selected from the group consisting of epitope sequences of any one of SEQ ID NOs: 15080-17174,
wherein each of the HIV MHC class I antigen-encoding nucleic acid sequences further comprises;
(A) optionally, a 5′ linker sequence, and
(B) optionally, a 3′ linker sequence;
(ii) optionally, a second promoter nucleotide sequence operably linked to the antigen-encoding nucleic acid sequence; and
(iii) optionally, at least one MHC class II antigen-encoding nucleic acid sequence;
(iv) optionally, at least one nucleic acid sequence encoding a GPGPG (SEQ ID NO: 159) amino acid linker sequence; and
(v) optionally, at least one second poly(A) sequence, wherein the second poly(A) sequence is a native poly(A) sequence or an exogenous poly(A) sequence to the vector backbone.

19. A composition for delivery of an antigen expression system comprising one or more vectors, the one or more vectors comprising:
(a) a vector backbone, wherein the backbone comprises:
(i) at least one promoter nucleotide sequence, and
(ii) at least one polyadenylation (poly(A)) sequence; and
(b) an antigen cassette, wherein the antigen cassette comprises:
(i) at least one antigen-encoding nucleic acid sequence, comprising:
(I) at least 10, 11, 12, 13, 14, 15, 16, 17, 18, 19, or 20 HIV MHC class I antigen-encoding nucleic acid sequences linearly linked to each other, wherein each HIV MHC class I antigen-encoding nucleic acid sequence comprises a MHC class I epitope encoding nucleic acid sequence that encodes a MHC class I epitope comprising at least one HIV epitope selected from the group consisting of the sequences shown in SEQ ID NOs: 17175-19388,
wherein each of the HIV MHC class I antigen-encoding nucleic acid sequences further comprises;
(A) optionally, a 5′ linker sequence, and
(B) optionally, a 3′ linker sequence;
(ii) optionally, a second promoter nucleotide sequence operably linked to the antigen-encoding nucleic acid sequence; and
(iii) optionally, at least one MHC class II antigen-encoding nucleic acid sequence;
(iv) optionally, at least one nucleic acid sequence encoding a GPGPG (SEQ ID NO: 160) amino acid linker sequence; and
(v) optionally, at least one second poly(A) sequence, wherein the second poly(A) sequence is a native poly(A) sequence or an exogenous poly(A) sequence to the vector backbone.

20. A composition for delivery of an antigen expression system comprising one or more vectors, the one or more vectors comprising:
(a) a vector backbone, wherein the backbone comprises:
(i) at least one promoter nucleotide sequence, and
(ii) at least one polyadenylation (poly(A)) sequence; and
(b) an antigen cassette, wherein the antigen cassette comprises:
(i) at least one antigen-encoding nucleic acid sequence, comprising:
(I) at least 10, 11, 12, 13, 14, 15, 16, 17, 18, 19, or 20 HIV MHC class I antigen-encoding nucleic acid sequences linearly linked to each other, wherein each HIV MHC class I antigen-encoding nucleic acid sequence comprises a MHC class I epitope encoding nucleic acid sequence that encodes a MHC class I epitope comprising at least one HIV epitope selected from the group consisting of the sequences shown in SEQ ID NOs: 19389-21003,
wherein each of the HIV MHC class I antigen-encoding nucleic acid sequences further comprises;
(A) optionally, a 5′ linker sequence, and
(B) optionally, a 3′ linker sequence;
(ii) optionally, a second promoter nucleotide sequence operably linked to the antigen-encoding nucleic acid sequence; and
(iii) optionally, at least one MHC class II antigen-encoding nucleic acid sequence;
(iv) optionally, at least one nucleic acid sequence encoding a GPGPG (SEQ ID NO: 161) amino acid linker sequence; and
(v) optionally, at least one second poly(A) sequence, wherein the second poly(A) sequence is a native poly(A) sequence or an exogenous poly(A) sequence to the vector backbone.

21. A composition for delivery of an antigen expression system comprising one or more vectors, the one or more vectors comprising:
(a) a vector backbone, wherein the backbone comprises:
(i) at least one promoter nucleotide sequence, and
(ii) at least one polyadenylation (poly(A)) sequence; and
(b) an antigen cassette, wherein the antigen cassette comprises:
(i) at least one antigen-encoding nucleic acid sequence, comprising:
(I) at least 10, 11, 12, 13, 14, 15, 16, 17, 18, 19, or 20 HIV MHC class I antigen-encoding nucleic acid sequences linearly linked to each other, wherein each HIV MHC class I antigen-encoding nucleic acid sequence comprises a MHC class I epitope encoding nucleic acid sequence that encodes a MHC class I epitope comprising at least one HIV epitope selected from the group consisting of the sequences shown in SEQ ID NOs: 21004-22349,
wherein each of the HIV MHC class I antigen-encoding nucleic acid sequences further comprises;
(A) optionally, a 5′ linker sequence, and
(B) optionally, a 3′ linker sequence;
(ii) optionally, a second promoter nucleotide sequence operably linked to the antigen-encoding nucleic acid sequence; and
(iii) optionally, at least one MHC class II antigen-encoding nucleic acid sequence;
(iv) optionally, at least one nucleic acid sequence encoding a GPGPG (SEQ ID NO: 162) amino acid linker sequence; and
(v) optionally, at least one second poly(A) sequence, wherein the second poly(A) sequence is a native poly(A) sequence or an exogenous poly(A) sequence to the vector backbone.

22. A composition for delivery of an antigen expression system comprising one or more vectors, the one or more vectors comprising:
(a) a vector backbone, wherein the vector backbone comprises
(i) a chimpanzee adenovirus vector, optionally wherein the chimpanzee adenovirus vector is a ChAdV68 vector, or an alphavirus vector, optionally wherein the alphavirus vector is a Venezuelan equine encephalitis virus vector,
and
(ii) a 26S promoter nucleotide sequence, and
(iii) a polyadenylation (poly(A)) sequence; and
(b) an antigen cassette integrated between the 26S promoter nucleotide sequence and the poly(A) sequence, wherein the antigen cassette comprises:
(i) at least one antigen-encoding nucleic acid sequence, comprising:
(I) at least 10, 11, 12, 13, 14, 15, 16, 17, 18, 19, or 20 HIV MHC class I antigen-encoding nucleic acid sequences linearly linked to each other and each comprising:
(A) a MHC class I epitope encoding nucleic acid sequence, wherein the MHC class I epitope encoding nucleic acid sequence encodes a MHC class I epitope 7-15 amino acids in length, and wherein at least one of the MHC class I epitopes is selected from the group consisting of epitope sequences from any one of SEQ ID Nos: 325-22349,
(B) a 5′ linker sequence, wherein the 5′ linker sequence encodes a native N-terminal amino acid sequence of the MHC class I epitope, and wherein the 5′ linker sequence encodes a peptide that is at least 3 amino acids in length,
(C) a 3′ linker sequence, wherein the 3′ linker sequence encodes a native C-terminal acid sequence of the MHC class I epitope, and wherein the 3′ linker sequence encodes a peptide that is at least 3 amino acids in length, and
wherein the antigen cassette is operably linked to the 26S promoter nucleotide sequence, wherein each of the MHC class I antigen-encoding nucleic acid sequences encodes a polypeptide that is between 13 and 25 amino acids in length, and wherein each 3′ end of each MHC class I antigen-encoding nucleic acid sequence is linked to the 5′ end of the following MHC class I antigen-encoding nucleic acid sequence with the exception of the final MHC class I antigen-encoding nucleic acid sequence in the antigen cassette; and
(ii) at least two MHC class II antigen-encoding nucleic acid sequences comprising:
(I) a PADRE MHC class II sequence,
(II) a Tetanus toxoid MHC class II sequence,
(III) a first nucleic acid sequence encoding a GPGPG (SEQ ID NO: 163) amino acid linker sequence linking the PADRE MHC class II sequence and the Tetanus toxoid MHC class II sequence,
(IV) a second nucleic acid sequence encoding a GPGPG (SEQ ID NO: 164) amino acid linker sequence linking the 5′ end of the at least two MHC class II antigen-encoding nucleic acid sequences to the HIV MHC class I antigen-encoding nucleic acid sequences,
(V) optionally, a third nucleic acid sequence encoding a GPGPG (SEQ ID NO: 165) amino acid linker sequence at the 3′ end of the at least two MHC class II antigen-encoding nucleic acid sequences.

23. The composition of any of claims 10-21, wherein an ordered sequence of each element of the antigen cassette is described in the formula, from 5′ to 3′, comprising:
Pₐ-(L5_{b}-N_{c}-L3_{d})_{X}-(G5ₑ-U_{f})_{Y}-G3_{g}
wherein P comprises the second promoter nucleotide sequence, where a=0 or 1,
N comprises one of the MHC class I epitope encoding nucleic acid sequences, where c=1,
L5 comprises the 5′ linker sequence, where b=0 or 1,
L3 comprises the 3′ linker sequence, where d=0 or 1,
G5 comprises one of the at least one nucleic acid sequences encoding a GPGPG (SEQ ID NO: 166) amino acid linker, where e=0 or 1,
G3 comprises one of the at least one nucleic acid sequences encoding a GPGPG (SEQ ID NO: 167) amino acid linker, where g=0 or 1,
U comprises one of the at least one MHC class II antigen-encoding nucleic acid sequence, where f=1,
X=1 to 400, where for each X the corresponding N_{c} is a epitope encoding nucleic acid sequence, and
Y=0, 1, or 2, where for each Y the corresponding U_{f} is an antigen-encoding nucleic acid sequence.

24. The composition of claim 22, wherein for each X the corresponding N_{c} is a distinct MHC class I epitope encoding nucleic acid sequence.

25. The composition of claim 22 or 24, wherein for each Y the corresponding U_{f} is a distinct MHC class II antigen-encoding nucleic acid sequence.

26. The composition of any one of claims 22-25, wherein
a=0, b=1, d=1, e=1, g=1, h=1, X=20, Y=2,
the at least one promoter nucleotide sequence is a single 26S promoter nucleotide sequence provided by the backbone,
the at least one polyadenylation poly(A) sequence is a poly(A) sequence of at least 100 consecutive A nucleotides (SEQ ID NO: 168) provided by the backbone,
each N encodes a MHC class I epitope 7-15 amino acids in length,
L5 is a native 5′ linker sequence that encodes a native N-terminal amino acid sequence of the MHC I epitope, and wherein the 5′ linker sequence encodes a peptide that is at least 3 amino acids in length,
L3 is a native 3′ linker sequence that encodes a native nucleic-terminal acid sequence of the MHC I epitope, and wherein the 3′ linker sequence encodes a peptide that is at least 3 amino acids in length,
U is each of a PADRE class II sequence and a Tetanus toxoid MHC class II sequence,
the vector backbone comprises a chimpanzee adenovirus vector, optionally wherein the chimpanzee adenovirus vector is a ChAdV68 vector, or an alphavirus vector, optionally wherein the alphavirus vector is a Venezuelan equine encephalitis virus vector, and
each of the MHC class I antigen-encoding nucleic acid sequences encodes a polypeptide that is between 13 and 25 amino acids in length.

27. The composition of any of the above claims, the composition further comprising a nanoparticulate delivery vehicle.

28. The composition of claim 27, wherein the nanoparticulate delivery vehicle is a lipid nanoparticle (LNP).

29. The composition of claim 28, wherein the LNP comprises ionizable amino lipids.

30. The composition of claim 29, wherein the ionizable amino lipids comprise MC3-like (dilinoleylmethyl-4-dimethylaminobutyrate) molecules.

31. The composition of any of claims claim 27-30, wherein the nanoparticulate delivery vehicle encapsulates the antigen expression system.

32. The composition of any one of claim 10-21, 23-25, or 27-31, wherein the antigen cassette is integrated between the at least one promoter nucleotide sequence and the at least one poly(A) sequence.

33. The composition of any one of claim 10-21, 23-25, or 27-32, wherein the at least one promoter nucleotide sequence is operably linked to the antigen-encoding nucleic acid sequence.

34. The composition of any one of claim 10-21, 23-25, or 27-33, wherein the one or more vectors comprise one or more +-stranded RNA vectors.

35. The composition of claim 34 wherein the one or more +-stranded RNA vectors comprise a 5′ 7-methylguanosine (m7g) cap.

36. The composition of claim 34 or 35, wherein the one or more +-stranded RNA vectors are produced by in vitro transcription.

37. The composition of any one of claim 10-21, 23-25, or 27-36, wherein the one or more vectors are self-replicating within a mammalian cell.

38. The composition of any one of claim 10-21, 23-25, or 27-37, wherein the backbone comprises at least one nucleotide sequence of an Aura virus, a Fort Morgan virus, a Venezuelan equine encephalitis virus, a Ross River virus, a Semliki Forest virus, a Sindbis virus, or a Mayaro virus.

39. The composition of any one of claim 10-21, 23-25, or 27-37, wherein the backbone comprises at least one nucleotide sequence of a Venezuelan equine encephalitis virus.

40. The composition of claim 38 or 39, wherein the backbone comprises at least sequences for nonstructural protein-mediated amplification, a 26S promoter sequence, a poly(A) sequence, a nonstructural protein 1 (nsP1) gene, a nsP2 gene, a nsP3 gene, and a nsP4 gene encoded by the nucleotide sequence of the Aura virus, the Fort Morgan virus, the Venezuelan equine encephalitis virus, the Ross River virus, the Semliki Forest virus, the Sindbis virus, or the Mayaro virus.

41. The composition of claim 38 or 39, wherein the backbone comprises at least sequences for nonstructural protein-mediated amplification, a 26S promoter sequence, and a poly(A) sequence encoded by the nucleotide sequence of the Aura virus, the Fort Morgan virus, the Venezuelan equine encephalitis virus, the Ross River virus, the Semliki Forest virus, the Sindbis virus, or the Mayaro virus.

42. The composition of claim 40 or 41, wherein sequences for nonstructural protein-mediated amplification are selected from the group consisting of: an alphavirus 5′ UTR, a 51-nt CSE, a 24-nt CSE, a 26S subgenomic promoter sequence, a 19-nt CSE, an alphavirus 3′ UTR, or combinations thereof.

43. The composition of any one of claims 40-42, wherein the backbone does not encode structural virion proteins capsid, E2 and E1.

44. The composition of claim 43, wherein the antigen cassette is inserted in place of structural virion proteins within the nucleotide sequence of the Aura virus, the Fort Morgan virus, the Venezuelan equine encephalitis virus, the Ross River virus, the Semliki Forest virus, the Sindbis virus, or the Mayaro virus.

45. The composition of claim 38 or 39, wherein the Venezuelan equine encephalitis virus comprises the sequence of SEQ ID NO:3 or SEQ ID NO:5.

46. The composition of claim 38 or 39, wherein the Venezuelan equine encephalitis virus comprises the sequence of SEQ ID NO:3 or SEQ ID NO:5 further comprising a deletion between base pair 7544 and 11175.

47. The composition of claim 46, wherein the backbone comprises the sequence set forth in SEQ ID NO:6 or SEQ ID NO:7.

48. The composition of claim 46 or 47, wherein the antigen cassette is inserted at position 7544 to replace the deletion between base pairs 7544 and 11175 as set forth in the sequence of SEQ ID NO:3 or SEQ ID NO:5.

49. The composition of claim 44-48, wherein the insertion of the antigen cassette provides for transcription of a polycistronic RNA comprising the nsP1-4 genes and the at least one antigen-encoding nucleic acid sequence, wherein the nsP1-4 genes and the at least one antigen-encoding nucleic acid sequence are in separate open reading frames.

50. The composition of any one of claim 10-21, 23-25, or 27-37, wherein the backbone comprises at least one nucleotide sequence of a chimpanzee adenovirus vector.

51. The composition of claim 50, wherein the chimpanzee adenovirus vector is a ChAdV68 vector.

52. The composition of any one of claim 10-21, 23-25, or 27-51, wherein the at least one promoter nucleotide sequence is the native 26S promoter nucleotide sequence encoded by the backbone.

53. The composition of any one of claim 10-21, 23-25, or 27-51, wherein the at least one promoter nucleotide sequence is an exogenous RNA promoter.

54. The composition of any one of claim 10-21, 23-25, or 27-53, wherein the second promoter nucleotide sequence is a 26S promoter nucleotide sequence.

55. The composition of any one of claim 10-21, 23-25, or 27-53, wherein the second promoter nucleotide sequence comprises multiple 26S promoter nucleotide sequences, wherein each 26S promoter nucleotide sequence provides for transcription of one or more of the separate open reading frames.

56. The composition of any one of claims 10-55, wherein the one or more vectors are each at least 300 nt in size.

57. The composition of any one of claims 10-56, wherein the one or more vectors are each at least 1 kb in size.

58. The composition of any one of claims 10-57, wherein the one or more vectors are each 2 kb in size.

59. The composition of any one of claims 10-58, wherein the one or more vectors are each less than 5 kb in size.

60. The composition of any one of claims 10-59, wherein at least one of the at least one antigen-encoding nucleic acid sequences encodes a polypeptide sequence or portion thereof that is presented by MHC class I protein.

61. The composition of any one of claim 10-21, 23-25, or 27-60, wherein each antigen-encoding nucleic acid sequence is linked directly to one another.

62. The composition of any one of claim 10-21, 23-25, or 27-61, wherein at least one of the at least one antigen-encoding nucleic acid sequences is linked to a distinct antigen-encoding nucleic acid sequence with a nucleic acid sequence encoding a linker.

63. The composition of claim 62, wherein the linker links two MHC class I epitope sequences or an MHC class I epitope sequence to an MHC class II sequence.

64. The composition of claim 63, wherein the linker is selected from the group consisting of: (1) consecutive glycine residues, at least 2, 3, 4, 5, 6, 7, 8, 9, or 10 (SEQ ID NO: 169 residues in length; (2) consecutive alanine residues, at least 2, 3, 4, 5, 6, 7, 8, 9, or 10 (SEQ ID NO: 170) residues in length; (3) two arginine residues (RR); (4) alanine, alanine, tyrosine (AAY); (5) a consensus sequence at least 2, 3, 4, 5, 6, 7, 8, 9, or 10 amino acid residues in length that is processed efficiently by a mammalian proteasome; and (6) one or more native sequences flanking the antigen derived from the cognate protein of origin and that is at least 2, 3, 4, 5, 6, 7, 8, 9, 10, 11, 12, 13, 14, 15, 16, 17, 18, 19, 20, or 2-20 amino acid residues in length.

65. The composition of claim 62, wherein the linker links two MHC class II sequences or an MHC class II sequence to an MHC class I epitope sequence.

66. The composition of claim 64, wherein the linker comprises the sequence GPGPG (SEQ ID NO: 171).

67. The composition of any one of claim 10-21, 23-25, or 27-66, wherein at least one sequence of the at least one antigen-encoding nucleic acid sequences is linked, operably or directly, to a separate or contiguous sequence that enhances the expression, stability, cell trafficking, processing and presentation, and/or immunogenicity of the at least one antigen-encoding nucleic acid sequences.

68. The composition of claim 67, wherein the separate or contiguous sequence comprises at least one of: a ubiquitin sequence, a ubiquitin sequence modified to increase proteasome targeting (e.g., the ubiquitin sequence contains a Gly to Ala substitution at position 76), an immunoglobulin signal sequence (e.g., IgK), a major histocompatibility class I sequence, lysosomal-associated membrane protein (LAMP)-1, human dendritic cell lysosomal-associated membrane protein, and a major histocompatibility class II sequence; optionally wherein the ubiquitin sequence modified to increase proteasome targeting is A76.

69. The composition of any one claim 10-21, 23-25, or 27-68, wherein the at least one antigen-encoding nucleic acid sequence comprises at least 2-10, 2, 3, 4, 5, 6, 7, 8, 9, 10, 11, 12, 13, 14, 15, 16, 17, 18, 19, or 20 nucleic acid sequences.

70. The composition of any one of claim 1-3, 10-21, 23-25, or 27-68, wherein the at least one HIV MHC class I antigen-encoding nucleic acid sequence or the at least one antigen-encoding nucleic acid sequence comprises at least 15-20, 11-100, 11-200, 11-300, 11-400, or up to 400 nucleic acid sequences.

71. The composition of any one of claim 1-3, 10-21, 23-25, or 27-68, wherein the at least one HIV MHC class I antigen-encoding nucleic acid sequence or the at least one antigen-encoding nucleic acid sequence comprises at least 2-400 nucleic acid sequences and wherein at least two of the antigen-encoding nucleic acid sequences encode polypeptide sequences or portions thereof that are presented by MHC class I protein.

72. The composition of claim 22 or 26, wherein at least two of the antigen-encoding nucleic acid sequences encode polypeptide sequences or portions thereof that are presented by MHC class I protein.

73. The composition of any of the above claims, wherein when administered to the subject and translated, at least one of the antigens encoded by the at least one HIV MHC class I antigen-encoding nucleic acid or the at least one of the MHC class I epitopes are presented on antigen presenting cells resulting in an immune response.

74. The composition of any one of claim 1-3 or 10-73, wherein the at least one HIV MHC class I antigen-encoding nucleic acid sequence, when administered to the subject and translated, at least one of the antigens are presented on antigen presenting cells resulting in an immune response, and optionally wherein the expression of each of the at least one antigen-encoding nucleic acid sequences is driven by the at least one promoter nucleotide sequence.

75. The composition of any one of claim 1-3 or 10-74, wherein each MHC class I antigen-encoding nucleic acid sequence encodes a polypeptide sequence between 8 and 35 amino acids in length, optionally 9-17, 9-25, 8, 9, 10, 11, 12, 13, 14, 15, 16, 17, 18, 19, 20, 21, 22, 23, 24, 25, 26, 27, 28, 29, 30, 31, 32, 33, 34 or 35 amino acids in length.

76. The composition of any one of claim 10-21, 23-25, or 27-75, wherein the at least one MHC class II antigen-encoding nucleic acid sequence is present.

77. The composition of any one of claim 10-21, 23-25, or 27-76, wherein the at least one MHC class II antigen-encoding nucleic acid sequence is 12-20, 12, 13, 14, 15, 16, 17, 18, 19, 20, or 20-40 amino acids in length.

78. The composition of any one of claim 10-21, 23-25, or 27-77, wherein the at least one MHC class II antigen-encoding nucleic acid sequence is present and comprises at least one universal MHC class II antigen-encoding nucleic acid sequence, optionally wherein the at least one universal sequence comprises at least one of Tetanus toxoid and PADRE.

79. The composition of any one of claim 10-21, 23-25, or 27-78, wherein the at least one promoter nucleotide sequence or the second promoter nucleotide sequence is inducible.

80. The composition of any one of claim 10-21, 23-25, or 27-78, wherein the at least one promoter nucleotide sequence or the second promoter nucleotide sequence is non-inducible.

81. The composition of any one of claim 10-21, 23-25, or 27-80, wherein the at least one poly(A) sequence comprises a poly(A) sequence native to the backbone.

82. The composition of any one of claim 10-21, 23-25, or 27-80, wherein the at least one poly(A) sequence comprises a poly(A) sequence exogenous to the backbone.

83. The composition of any one claim 10-21, 23-25, or 27-82, wherein the at least one poly(A) sequence is operably linked to at least one of the at least one antigen-encoding nucleic acid sequences.

84. The composition of any one of claim 10-21, 23-25, or 27-83, wherein the at least one poly(A) sequence is at least 20, at least 30, at least 40, at least 50, at least 60, at least 70, at least 80, or at least 90 consecutive A nucleotides (SEQ ID NO: 172).

85. The composition of any one of claim 10-21, 23-25, or 27-83, wherein the at least one poly(A) sequence is at least 100 consecutive A nucleotides (SEQ ID NO: 173).

86. The composition of any one of claim 1-3 or 10-85, wherein the antigen expression system further comprises at least one of: an intron sequence, a woodchuck hepatitis virus posttranscriptional regulatory element (WPRE) sequence, an internal ribosome entry sequence (IRES) sequence, a nucleotide sequence encoding a 2A self cleaving peptide sequence, a nucleotide sequence encoding a Furin cleavage site, or a sequence in the 5′ or 3′ non-coding region known to enhance the nuclear export, stability, or translation efficiency of mRNA that is operably linked to at least one of the at least one antigen-encoding nucleic acid sequences.

87. The composition of any one of claim 1-3 or 10-86, wherein the antigen expression system further comprises a reporter gene, including but not limited to, green fluorescent protein (GFP), a GFP variant, secreted alkaline phosphatase, luciferase, a luciferase variant, or a detectable peptide or epitope.

88. The composition of claim 87, wherein the detectable peptide or epitope is selected from the group consisting of an HA tag, a Flag tag, a His-tag, or a V5 tag.

89. The composition of any one of claim 10-21, 23-25, or 27-75, wherein the at least one MHC class I antigen-encoding nucleic acid sequence is selected by performing the steps of:
(a) obtaining at least one of exome, transcriptome, or whole genome nucleotide sequencing, wherein the nucleotide sequencing data is used to obtain data representing peptide sequences of each of a set of antigens;
(b) inputting the peptide sequence of each antigen into a presentation model to generate a set of numerical likelihoods that each of the antigens is presented by one or more of the MHC proteins, the set of numerical likelihoods having been identified at least based on received mass spectrometry data; and
(c) selecting a subset of the set of antigens based on the set of numerical likelihoods to generate a set of selected antigens which are used to generate the at least one MHC class I antigen-encoding nucleic acid sequence.

90. The composition of claim 22 or 26, wherein each of the MHC class I epitope encoding nucleic acid sequences is selected by performing the steps of:
(a) obtaining at least one of exome, transcriptome, or whole genome nucleotide sequencing data, wherein the nucleotide sequencing data is used to obtain data representing peptide sequences of each of a set of antigens;
(b) inputting the peptide sequence of each antigen into a presentation model to generate a set of numerical likelihoods that each of the antigens is presented by one or more MHC proteins, the set of numerical likelihoods having been identified at least based on received mass spectrometry data; and
(c) selecting a subset of the set of antigens based on the set of numerical likelihoods to generate a set of selected antigens which are used to generate the at least 20 MHC class I antigen-encoding nucleic acid sequences.

91. The composition of claim 9, 89, or 90, wherein a number of the set of selected antigens is 2-20.

92. The composition of claim 9 or 89-91, wherein the presentation model represents dependence between:
(a) presence of a pair of a particular one of the MHC alleles and a particular amino acid at a particular position of a peptide sequence; and
(b) likelihood of presentation, by the particular one of the MHC alleles of the pair, of such a peptide sequence comprising the particular amino acid at the particular position.

93. The composition of claim 9 or 89-92, wherein selecting the set of selected antigens comprises selecting antigens that have an increased likelihood of being presented relative to unselected antigens based on the presentation model, optionally wherein the selected antigens have been validated as being presented by one or more specific HLA alleles.

94. The composition of claim 9 or 89-93, wherein selecting the set of selected antigens comprises selecting antigens that have an increased likelihood of being capable of inducing an immune response in response to presence of HIV in the subject relative to unselected antigens based on the presentation model.

95. The composition of claim 9 or 89-94, wherein selecting the set of selected antigens comprises selecting antigens that have an increased likelihood of being capable of being presented to naïve T cells by professional antigen presenting cells (APCs) relative to unselected antigens based on the presentation model, optionally wherein the APC is a dendritic cell (DC).

96. The composition of claim 9 or 89-95, wherein selecting the set of selected antigens comprises selecting antigens that have a decreased likelihood of being subject to inhibition via central or peripheral tolerance relative to unselected antigens based on the presentation model.

97. The composition of claim 9 or 89-96, wherein selecting the set of selected antigens comprises selecting antigens that have a decreased likelihood of being capable of inducing an autoimmune response to normal tissue in the subject relative to unselected antigens based on the presentation model.

98. The composition of claim 9 or 89-97, wherein exome or transcriptome nucleotide sequencing data is obtained by performing next generation sequencing (NGS) or any massively parallel sequencing approach.

99. The composition of any one of claim 1-3 or 10-98, wherein the antigen cassette comprises junctional epitope sequences formed by adjacent sequences in the antigen cassette.

100. The composition of claim 99, wherein at least one or each junctional epitope sequence has an affinity of greater than 500 nM for MHC.

101. The composition of claim 99 or 100, wherein each junctional epitope sequence is non-self.

102. The composition of any of the above claims, wherein each of the MHC class I epitopes is predicted or validated to be capable of presentation by at least one HLA allele present in at least 5% of a population.

103. The composition of any of the above claims, wherein each of the MHC class I epitopes is predicted or validated to be capable of presentation by at least one HLA allele, wherein each antigen/HLA pair has an antigen/HLA prevalence of at least 0.01% in a population.

104. The composition of any of the above claims, wherein each of the MHC class I epitopes is predicted or validated to be capable of presentation by at least one HLA allele, wherein each antigen/HLA pair has an antigen/HLA prevalence of at least 0.1% in a population.

105. A pharmaceutical composition comprising the composition of any of the above claims and a pharmaceutically acceptable carrier.

106. The composition of claim 105, wherein the composition further comprises an adjuvant.

107. An isolated nucleotide sequence or set of isolated nucleotide sequences comprising the antigen cassette of any of the above composition claims and one or more elements obtained from the sequence of SEQ ID NO:3 or SEQ ID NO:5, optionally wherein the one or more elements are selected from the group consisting of the sequences necessary for nonstructural protein-mediated amplification, the 26S promoter nucleotide sequence, the poly(A) sequence, and the nsP1-4 genes of the sequence set forth in SEQ ID NO:3 or SEQ ID NO:5, and optionally wherein the nucleotide sequence is cDNA.

108. The isolated nucleotide sequence of claim 107, wherein the sequence or set of isolated nucleotide sequences comprises the antigen cassette of any of the above composition claims inserted at position 7544 of the sequence set forth in SEQ ID NO:6 or SEQ ID NO:7.

109. The isolated nucleotide sequence of claim 107 or 108, further comprising:
a T7 or SP6 RNA polymerase promoter nucleotide sequence 5′ of the one or more elements obtained from the sequence of SEQ ID NO:3 or SEQ ID NO:5; and
optionally, one or more restriction sites 3′ of the poly(A) sequence.

110. The isolated nucleotide sequence of claim 107, wherein the antigen cassette of any of the above composition claims is inserted at position 7563 of SEQ ID NO:8 or SEQ ID NO:9.

111. A vector or set of vectors comprising the nucleotide sequence of claims 107-110.

112. An isolated cell comprising the nucleotide sequence or set of isolated nucleotide sequences of claims 107-111, optionally wherein the cell is a BHK-21, CHO, HEK293 or variants thereof, 911, HeLa, A549, LP-293, PER.C6, or AE1-2a cell.

113. A method for treating a subject with HIV, the method comprising administering to the subject the composition of any of the above composition claims or the pharmaceutical composition of any of claims 105-106.

114. A method for inducing an immune response in a subject, the method comprising administering to the subject the composition of any of the above composition claims or the pharmaceutical composition of any of claims 105-106.

115. The method any of claims 113-114, wherein the subject expresses at least one HLA allele predicted or known to present at least one of the MHC class I epitopes encoded by the one or more vectors of the antigen expression system.

116. The method of any of claims 113-115, wherein the composition is administered intramuscularly (IM), intradermally (ID), subcutaneously (SC), or intravenously (IV).

117. The method of any of claims 113-115, wherein the composition is administered intramuscularly.

118. The method of any one of claims 113-117, further comprising administering to the subject a second vaccine composition.

119. The method of claim 118, wherein the second vaccine composition is administered prior to the administration of the composition or the pharmaceutical composition of any one of claims 113-114.

120. The method of claim 118, wherein the second vaccine composition is administered subsequent to the administration of the composition or the pharmaceutical composition of any one of claims 113-114.

121. The method of claim 119 or 120, wherein the second vaccine composition is the same as the composition or the pharmaceutical composition of any one of 113-114.

122. The method of claim 119 or 120, wherein the second vaccine composition is different from the composition or the pharmaceutical composition of any one of claims 113-114.

123. The method of claim 122, wherein the second vaccine composition comprises a chimpanzee adenovirus vector encoding at least one antigen-encoding nucleic acid sequence.

124. The method of claim 123, wherein the at least one antigen-encoding nucleic acid sequence encoded by the chimpanzee adenovirus vector is the same as the at least one antigen-encoding nucleic acid sequence of any of the above composition claims.

125. A method of manufacturing the antigen expression system of any one of claim 1-4 or 10-106, the method comprising:
(a) obtaining a linearized DNA sequence comprising the backbone and the antigen cassette;
(b) in vitro transcribing the linearized DNA sequence by addition of the linearized DNA sequence to an in vitro transcription reaction containing all the necessary components to trancribe the linearized DNA sequence into RNA, optionally further comprising in vitro addition of the m7g cap to the resulting RNA; and
(c) isolating the one or more vectors from the in vitro transcription reaction.

126. The method of manufacturing of claim 125, wherein the linearized DNA sequence is generated by linearizing a DNA plasmid sequence or by amplification using PCR.

127. The method of manufacturing of claim 126, wherein the DNA plasmid sequence is generated using one of bacterial recombination or full genome DNA synthesis or full genome DNA synthesis with amplification of synthesized DNA in bacterial cells.

128. The method of manufacturing of claim 125, wherein isolating the one or more vectors from the in vitro transcription reaction involves one or more of phenol chloroform extraction, silica column based purification, or similar RNA purification methods.

129. A method of manufacturing the composition of any one of claim 1-4 or 10-106 for delivery of the antigen expression system, the method comprising:
(a) providing components for the nanoparticulate delivery vehicle;
(b) providing the antigen expression system; and
(c) providing conditions sufficient for the nanoparticulate delivery vehicle and the antigen expression system to produce the composition for delivery of the antigen expression system.

130. The method of manufacturing of claim 129, wherein the conditions are provided by microfluidic mixing.

131. A method of assessing a subject having HIV, comprising the steps of:
a) determining or having determined a HIV subtype of the HIV of the subject;
b) determining or having determined whether the subject expresses a HLA allele predicted or known to present a MHC class I epitope encoded by an antigen-encoding nucleic acid sequence in an antigen-based vaccine, and
c) determining or having determined that the subject is a candidate for therapy with the antigen-based vaccine when the subject expresses the HLA allele, and the HIV subtype expresses the MHC class I epitope encoded by the antigen-encoding nucleic acid sequence in the antigen-based vaccine,
wherein the MHC class I epitope comprises at least one MHC class I epitope sequence selected from the group consisting of epitope sequences from any one of SEQ ID Nos: 325-22349, and
d) optionally, administering or having administered the antigen-based vaccine to the subject.

132. The method of claim 131, wherein the HLA allele expressed by the subject is selected from the group consisting of HLA alleles in Tables 35-45.

133. A method of assessing a subject having HIV, comprising the steps of:
a) determining or having determined the HIV of the subject is HIV subtype A1;
b) determining or having determined whether the subject expresses a HLA allele predicted or known to present a MHC class I epitope encoded by an antigen-encoding nucleic acid sequence in an antigen-based vaccine, and
c) determining or having determined that the subject is a candidate for therapy with the antigen-based vaccine when the subject expresses the HLA allele, and the HIV subtype expresses the MHC class I epitope encoded by the antigen-encoding nucleic acid sequence in the antigen-based vaccine,
wherein the MHC class I epitope comprises at least one MHC class I epitope sequence comprising at least one HIV epitope selected from the group consisting of the sequences shown in SEQ ID NOs: 325-2165, and
d) optionally, administering or having administered the antigen-based vaccine to the subject.

134. The method of claim 133, wherein the HLA allele expressed by the subject is selected from the group consisting of HLA alleles in Table 35.

135. A method of assessing a subject having HIV, comprising the steps of:
a) determining or having determined the HIV of the subject is HIV subtype A2;
b) determining or having determined whether the subject expresses a HLA allele predicted or known to present a MHC class I epitope encoded by an antigen-encoding nucleic acid sequence in an antigen-based vaccine, and
c) determining or having determined that the subject is a candidate for therapy with the antigen-based vaccine when the subject expresses the HLA allele, and the HIV subtype expresses the MHC class I epitope encoded by the antigen-encoding nucleic acid sequence in the antigen-based vaccine,
wherein the MHC class I epitope comprises at least one MHC class I epitope sequence comprising at least one HIV epitope selected from the group consisting of the sequences shown in SEQ ID NOs: 2166-4106, and
d) optionally, administering or having administered the antigen-based vaccine to the subject.

136. The method of claim 135, wherein the HLA allele expressed by the subject is selected from the group consisting of HLA alleles in Table 36.

137. A method of assessing a subject having HIV, comprising the steps of:
a) determining or having determined the HIV of the subject is HIV subtype B;
b) determining or having determined whether the subject expresses a HLA allele predicted or known to present a MHC class I epitope encoded by an antigen-encoding nucleic acid sequence in an antigen-based vaccine, and
c) determining or having determined that the subject is a candidate for therapy with the antigen-based vaccine when the subject expresses the HLA allele, and the HIV subtype expresses the MHC class I epitope encoded by the antigen-encoding nucleic acid sequence in the antigen-based vaccine,
wherein the MHC class I epitope comprises at least one MHC class I epitope sequence comprising at least one HIV epitope selected from the group consisting of the sequences shown in SEQ ID NOs: 4107-6241, and
d) optionally, administering or having administered the antigen-based vaccine to the subject.

138. The method of claim 137, wherein the HLA allele expressed by the subject is selected from the group consisting of HLA alleles in Table 37.

139. A method of assessing a subject having HIV, comprising the steps of:
a) determining or having determined the HIV of the subject is HIV subtype C;
b) determining or having determined whether the subject expresses a HLA allele predicted or known to present a MHC class I epitope encoded by an antigen-encoding nucleic acid sequence in an antigen-based vaccine, and
c) determining or having determined that the subject is a candidate for therapy with the antigen-based vaccine when the subject expresses the HLA allele, and the HIV subtype expresses the MHC class I epitope encoded by the antigen-encoding nucleic acid sequence in the antigen-based vaccine,
wherein the MHC class I epitope comprises at least one MHC class I epitope sequence comprising at least one HIV epitope selected from the group consisting of the sequences shown in SEQ ID NOs: 6242-8389, and
d) optionally, administering or having administered the antigen-based vaccine to the subject.

140. The method of claim 139, wherein the HLA allele expressed by the subject is selected from the group consisting of HLA alleles in Table 38.

141. A method of assessing a subject having HIV, comprising the steps of:
a) determining or having determined the HIV of the subject is HIV subtype D;
b) determining or having determined whether the subject expresses a HLA allele predicted or known to present a MHC class I epitope encoded by an antigen-encoding nucleic acid sequence in an antigen-based vaccine, and
c) determining or having determined that the subject is a candidate for therapy with the antigen-based vaccine when the subject expresses the HLA allele, and the HIV subtype expresses the MHC class I epitope encoded by the antigen-encoding nucleic acid sequence in the antigen-based vaccine,
wherein the MHC class I epitope comprises at least one MHC class I epitope sequence comprising at least one HIV epitope selected from the group consisting of the sequences shown in SEQ ID NOs: 8930-10626, and
d) optionally, administering or having administered the antigen-based vaccine to the subject.

142. The method of claim 141, wherein the HLA allele expressed by the subject is selected from the group consisting of HLA alleles in Table 39.

143. A method of assessing a subject having HIV, comprising the steps of:
a) determining or having determined the HIV of the subject is HIV subtype F1;
b) determining or having determined whether the subject expresses a HLA allele predicted or known to present a MHC class I epitope encoded by an antigen-encoding nucleic acid sequence in an antigen-based vaccine, and
c) determining or having determined that the subject is a candidate for therapy with the antigen-based vaccine when the subject expresses the HLA allele, and the HIV subtype expresses the MHC class I epitope encoded by the antigen-encoding nucleic acid sequence in the antigen-based vaccine,
wherein the MHC class I epitope comprises at least one HIV epitope selected from the group consisting of the sequences shown in SEQ ID NOs: 10627-12810, and
d) optionally, administering or having administered the antigen-based vaccine to the subject.

144. The method of claim 143, wherein the HLA allele expressed by the subject is selected from the group consisting of HLA alleles in Table 40.

145. A method of assessing a subject having HIV, comprising the steps of:
a) determining or having determined the HIV of the subject is HIV subtype F2;
b) determining or having determined whether the subject expresses a HLA allele predicted or known to present a MHC class I epitope encoded by an antigen-encoding nucleic acid sequence in an antigen-based vaccine, and
c) determining or having determined that the subject is a candidate for therapy with the antigen-based vaccine when the subject expresses the HLA allele, and the HIV subtype expresses the MHC class I epitope encoded by the antigen-encoding nucleic acid sequence in the antigen-based vaccine,
wherein the MHC class I epitope comprises at least one HIV epitope selected from the group consisting of the sequences shown in SEQ ID NOs: 12811-15079, and
d) optionally, administering or having administered the antigen-based vaccine to the subject.

146. The method of claim 145, wherein the HLA allele expressed by the subject is selected from the group consisting of HLA alleles in Table 41.

147. A method of assessing a subject having HIV, comprising the steps of:
a) determining or having determined the HIV of the subject is HIV subtype G;
b) determining or having determined whether the subject expresses a HLA allele predicted or known to present a MHC class I epitope encoded by an antigen-encoding nucleic acid sequence in an antigen-based vaccine, and
c) determining or having determined that the subject is a candidate for therapy with the antigen-based vaccine when the subject expresses the HLA allele, and the HIV subtype expresses the MHC class I epitope encoded by the antigen-encoding nucleic acid sequence in the antigen-based vaccine,
wherein the MHC class I epitope comprises at least one HIV epitope selected from the group consisting of the sequences shown in SEQ ID NOs: 15080-17174, and
d) optionally, administering or having administered the antigen-based vaccine to the subject.

148. The method of claim 147, wherein the HLA allele expressed by the subject is selected from the group consisting of HLA alleles in Table 42.

149. A method of assessing a subject having HIV, comprising the steps of:
a) determining or having determined the HIV of the subject is HIV subtype H;
b) determining or having determined whether the subject expresses a HLA allele predicted or known to present a MHC class I epitope encoded by an antigen-encoding nucleic acid sequence in an antigen-based vaccine, and
c) determining or having determined that the subject is a candidate for therapy with the antigen-based vaccine when the subject expresses the HLA allele, and the HIV subtype expresses the MHC class I epitope encoded by the antigen-encoding nucleic acid sequence in the antigen-based vaccine,
wherein the MHC class I epitope comprises at least one MHC class I epitope sequence comprising at least one HIV epitope selected from the group consisting of the sequences shown in SEQ ID NOs: 17175-19388, and
d) optionally, administering or having administered the antigen-based vaccine to the subject.

150. The method of claim 149, wherein the HLA allele expressed by the subject is selected from the group consisting of HLA alleles in Table 43.

151. A method of assessing a subject having HIV, comprising the steps of:
a) determining or having determined the HIV of the subject is HIV subtype J;
b) determining or having determined whether the subject expresses a HLA allele predicted or known to present a MHC class I epitope encoded by an antigen-encoding nucleic acid sequence in an antigen-based vaccine, and
c) determining or having determined that the subject is a candidate for therapy with the antigen-based vaccine when the subject expresses the HLA allele, and the HIV subtype expresses the MHC class I epitope encoded by the antigen-encoding nucleic acid sequence in the antigen-based vaccine,
wherein the MHC class I epitope comprises at least one MHC class I epitope sequence comprising at least one HIV epitope selected from the group consisting of the sequences shown in SEQ ID NOs: 19389-21003, and
d) optionally, administering or having administered the antigen-based vaccine to the subject.

152. The method of claim 151, wherein the HLA allele expressed by the subject is selected from the group consisting of HLA alleles in Table 44.

153. A method of assessing a subject having HIV, comprising the steps of:
a) determining or having determined the HIV of the subject is HIV subtype K;
b) determining or having determined whether the subject expresses a HLA allele predicted or known to present a MHC class I epitope encoded by an antigen-encoding nucleic acid sequence in an antigen-based vaccine, and
c) determining or having determined that the subject is a candidate for therapy with the antigen-based vaccine when the subject expresses the HLA allele, and the HIV subtype expresses the MHC class I epitope encoded by the antigen-encoding nucleic acid sequence in the antigen-based vaccine,
wherein the MHC class I epitope comprises at least one MHC class I epitope sequence comprising at least one HIV epitope selected from the group consisting of the sequences shown in SEQ ID NOs: 21004-22349, and
d) optionally, administering or having administered the antigen-based vaccine to the subject.

154. The method of claim 153, wherein the HLA allele expressed by the subject is selected from the group consisting of HLA alleles in Table 45.

155. The method of any of claims 131-154, wherein determining or having determined a HIV subtype of the HIV of the subject comprises obtaining a dataset indicating the HIV subtype from a third party that has processed a sample from the subject.

156. The method of any of claims 131-154, wherein determining or having determined whether the subject expresses a HLA allele comprises obtaining a dataset from a third party that has processed a sample from the subject.

157. The method of any of claims 131-154, wherein determining or having determined whether the subject expresses a HLA allele comprises obtaining a sample from the subject and assaying the sample using a method selected from the group consisting of: exome sequencing, targeted exome sequencing, transcriptome sequencing, Sanger sequencing, PCR-based genotyping assays, mass-spectrometry based methods, microarray, Nanostring, ISH, and IHC.

158. The method of claim 157, wherein the sample is selected from tissue, bodily fluid, blood, spinal fluid, or needle aspirate.

159. The method of any of claims 131-158, wherein the HLA allele has an HLA frequency of at least 1%.

160. A method for treating a subject, the method comprising administering to the subject an antigen-based vaccine, wherein the antigen-based vaccine comprises:
1) at least one MHC class I epitope expressed by a HIV subtype, or
2) a MHC class I epitope encoding nucleic acid sequence encoding the at least one MHC class I epitope,
wherein the at least one MHC class I epitope comprises at least one HIV epitope sequence selected from the group consisting of the sequences shown in SEQ ID Nos: 325-22349.

161. A method for treating a subject with HIV, the method comprising administering to the subject an antigen-based vaccine, wherein the antigen-based vaccine comprises:
1) at least one MHC class I epitope expressed by a HIV subtype, wherein the HIV subtype is HIV subtype A1, or
2) a MHC class I epitope encoding nucleic acid sequence encoding the at least one MHC class I epitope,
wherein the at least one MHC class I epitope comprises a MHC class I epitope sequence comprising at least one HIV epitope selected from the group consisting of the sequences shown in SEQ ID NOs: 325-2165.

162. A method for treating a subject with HIV, the method comprising administering to the subject an antigen-based vaccine, wherein the antigen-based vaccine comprises:
1) at least one MHC class I epitope expressed by a HIV subtype, wherein the HIV subtype is HIV subtype A2, or
2) a MHC class I epitope encoding nucleic acid sequence encoding the at least one MHC class I epitope,
wherein the at least one MHC class I epitope comprises a MHC class I epitope sequence comprising at least one HIV epitope selected from the group consisting of the sequences shown in SEQ ID NOs: 2166-4106.

163. A method for treating a subject with HIV, the method comprising administering to the subject an antigen-based vaccine, wherein the antigen-based vaccine comprises:
1) at least one MHC class I epitope expressed by a HIV subtype, wherein the HIV subtype is HIV subtype B, or
2) a MHC class I epitope encoding nucleic acid sequence encoding the at least one MHC class I epitope,
wherein the at least one MHC class I epitope comprises a MHC class I epitope sequence comprising at least one HIV epitope selected from the group consisting of the sequences shown in SEQ ID NOs: 4107-6241.

164. A method for treating a subject with HIV, the method comprising administering to the subject an antigen-based vaccine, wherein the antigen-based vaccine comprises:
1) at least one MHC class I epitope expressed by a HIV subtype, wherein the HIV subtype is HIV subtype C, or
2) a MHC class I epitope encoding nucleic acid sequence encoding the at least one MHC class I epitope,
wherein the at least one MHC class I epitope comprises a MHC class I epitope sequence comprising at least one HIV epitope selected from the group consisting of the sequences shown in SEQ ID NOs: 6242-8389.

165. A method for treating a subject with HIV, the method comprising administering to the subject an antigen-based vaccine, wherein the antigen-based vaccine comprises:
1) at least one MHC class I epitope expressed by a HIV subtype, wherein the HIV subtype is HIV subtype D, or
2) a MHC class I epitope encoding nucleic acid sequence encoding the at least one MHC class I epitope,
wherein the at least one MHC class I epitope comprises a MHC class I epitope sequence comprising at least one HIV epitope selected from the group consisting of the sequences shown in SEQ ID NOs: 8930-10626.

166. A method for treating a subject with HIV, the method comprising administering to the subject an antigen-based vaccine, wherein the antigen-based vaccine comprises:
1) at least one MHC class I epitope expressed by a HIV subtype, wherein the HIV subtype is HIV subtype F1, or
2) a MHC class I epitope encoding nucleic acid sequence encoding the at least one MHC class I epitope,
wherein the at least one MHC class I epitope comprises at least one HIV epitope sequence selected from the group consisting of the sequences shown in SEQ ID NOs: 10627-12810.

167. A method for treating a subject with HIV, the method comprising administering to the subject an antigen-based vaccine, wherein the antigen-based vaccine comprises:
1) at least one MHC class I epitope expressed by a HIV subtype, wherein the HIV subtype is HIV subtype F2, or
2) a MHC class I epitope encoding nucleic acid sequence encoding the at least one MHC class I epitope,
wherein the at least one MHC class I epitope comprises at least one HIV epitope sequence selected from the group consisting of the sequences shown in SEQ ID NOs: 12811-15079.

168. A method for treating a subject with HIV, the method comprising administering to the subject an antigen-based vaccine, wherein the antigen-based vaccine comprises:
1) at least one MHC class I epitope expressed by a HIV subtype, wherein the HIV subtype is HIV subtype G, or
2) a MHC class I epitope encoding nucleic acid sequence encoding the at least one MHC class I epitope,
wherein the at least one MHC class I epitope comprises at least one HIV epitope sequence selected from the group consisting of the sequences shown in SEQ ID NOs: 15080-17174.

169. A method for treating a subject with HIV, the method comprising administering to the subject an antigen-based vaccine, wherein the antigen-based vaccine comprises:
1) at least one MHC class I epitope expressed by a HIV subtype, wherein the HIV subtype is HIV subtype H, or
2) a MHC class I epitope encoding nucleic acid sequence encoding the at least one MHC class I epitope,
wherein the at least one MHC class I epitope comprises a MHC class I epitope sequence comprising at least one HIV epitope selected from the group consisting of the sequences shown in SEQ ID NOs: 17175-19388.

170. A method for treating a subject with HIV, the method comprising administering to the subject an antigen-based vaccine, wherein the antigen-based vaccine comprises:
1) at least one MHC class I epitope expressed by a HIV subtype, wherein the HIV subtype is HIV subtype J, or
2) a MHC class I epitope encoding nucleic acid sequence encoding the at least one MHC class I epitope,
wherein the at least one MHC class I epitope comprises a MHC class I epitope sequence comprising at least one HIV epitope selected from the group consisting of the sequences shown in SEQ ID NOs: 19389-21003.

171. A method for treating a subject with HIV, the method comprising administering to the subject an antigen-based vaccine, wherein the antigen-based vaccine comprises:
1) at least one MHC class I epitope expressed by a HIV subtype, wherein the HIV subtype is HIV subtype K, or
2) a MHC class I epitope encoding nucleic acid sequence encoding the at least one MHC class I epitope,
wherein the at least one MHC class I epitope comprises a MHC class I epitope sequence comprising at least one HIV epitope selected from the group consisting of the sequences shown in SEQ ID NOs: 21004-22349.

172. A method for inducing an immune response in a subject with HIV, the method comprising administering to the subject an antigen-based vaccine, wherein the antigen-based vaccine comprises:
1) at least one MHC class I epitope expressed by a HIV subtype, or
2) a MHC class I epitope encoding nucleic acid sequence encoding the at least one MHC class I epitope,
wherein the at least one MHC class I epitope comprises at least one HIV epitope sequence selected from the group consisting of the sequences shown in SEQ ID Nos: 325-22349.

173. A method for inducing an immune response in a subject with HIV, the method comprising administering to the subject an antigen-based vaccine, wherein the antigen-based vaccine comprises:
1) at least one MHC class I epitope expressed by a HIV subtype, wherein the HIV subtype is HIV subtype A1, or
2) a MHC class I epitope encoding nucleic acid sequence encoding the at least one MHC class I epitope,
wherein the at least one MHC class I epitope comprises a MHC class I epitope sequence comprising at least one HIV epitope selected from the group consisting of the sequences shown in SEQ ID NOs: 325-2165.

174. A method for inducing an immune response in a subject with HIV, the method comprising administering to the subject an antigen-based vaccine, wherein the antigen-based vaccine comprises:
1) at least one MHC class I epitope expressed by a HIV subtype, wherein the HIV subtype is HIV subtype A2, or
2) a MHC class I epitope encoding nucleic acid sequence encoding the at least one MHC class I epitope,
wherein the at least one MHC class I epitope comprises a MHC class I epitope sequence comprising at least one HIV epitope selected from the group consisting of the sequences shown in SEQ ID NOs: 2166-4106.

175. A method for inducing an immune response in a subject with HIV, the method comprising administering to the subject an antigen-based vaccine, wherein the antigen-based vaccine comprises:
1) at least one MHC class I epitope expressed by a HIV subtype, wherein the HIV subtype is HIV subtype B, or
2) a MHC class I epitope encoding nucleic acid sequence encoding the at least one MHC class I epitope,
wherein the at least one MHC class I epitope comprises a MHC class I epitope sequence comprising at least one HIV epitope selected from the group consisting of the sequences shown in SEQ ID NOs: 4107-6241.

176. A method for inducing an immune response in a subject with HIV, the method comprising administering to the subject an antigen-based vaccine, wherein the antigen-based vaccine comprises:
1) at least one MHC class I epitope expressed by a HIV subtype, wherein the HIV subtype is HIV subtype C, or
2) a MHC class I epitope encoding nucleic acid sequence encoding the at least one MHC class I epitope,
wherein the at least one MHC class I epitope comprises a MHC class I epitope sequence comprising at least one HIV epitope selected from the group consisting of the sequences shown in SEQ ID NOs: 6242-8389.

177. A method for inducing an immune response in a subject with HIV, the method comprising administering to the subject an antigen-based vaccine, wherein the antigen-based vaccine comprises:
1) at least one MHC class I epitope expressed by a HIV subtype, wherein the HIV subtype is HIV subtype D, or
2) a MHC class I epitope encoding nucleic acid sequence encoding the at least one MHC class I epitope,
wherein the at least one MHC class I epitope comprises a MHC class I epitope sequence selected from a group consisting of epitope sequences of any one of SEQ ID NOs: 8930-10626.

178. A method for inducing an immune response in a subject with HIV, the method comprising administering to the subject an antigen-based vaccine, wherein the antigen-based vaccine comprises:
1) at least one MHC class I epitope expressed by a HIV subtype, wherein the HIV subtype is HIV subtype F1, or
2) a MHC class I epitope encoding nucleic acid sequence encoding the at least one MHC class I epitope,
wherein the at least one MHC class I epitope comprises at least one HIV epitope sequence selected from the group consisting of the sequences shown in SEQ ID NOs: 10627-12810.

179. A method for inducing an immune response in a subject with HIV, the method comprising administering to the subject an antigen-based vaccine, wherein the antigen-based vaccine comprises:
1) at least one MHC class I epitope expressed by a HIV subtype, wherein the HIV subtype is HIV subtype F2, or
2) a MHC class I epitope encoding nucleic acid sequence encoding the at least one MHC class I epitope,
wherein the at least one MHC class I epitope comprises at least one HIV epitope sequence selected from the group consisting of the sequences shown in SEQ ID NOs: 12811-15079.

180. A method for inducing an immune response in a subject with HIV, the method comprising administering to the subject an antigen-based vaccine, wherein the antigen-based vaccine comprises:
1) at least one MHC class I epitope expressed by a HIV subtype, wherein the HIV subtype is HIV subtype G, or
2) a MHC class I epitope encoding nucleic acid sequence encoding the at least one MHC class I epitope,
wherein the at least one MHC class I epitope comprises at least one HIV epitope sequence selected from the group consisting of the sequences shown in SEQ ID NOs: 15080-17174.

181. A method for inducing an immune response in a subject with HIV, the method comprising administering to the subject an antigen-based vaccine, wherein the antigen-based vaccine comprises:
1) at least one MHC class I epitope expressed by a HIV subtype, wherein the HIV subtype is HIV subtype H, or
2) a MHC class I epitope encoding nucleic acid sequence encoding the at least one MHC class I epitope,
wherein the at least one MHC class I epitope comprises a MHC class I epitope sequence comprising at least one HIV epitope selected from the group consisting of the sequences shown in SEQ ID NOs: 17175-19388.

182. A method for inducing an immune response in a subject with HIV, the method comprising administering to the subject an antigen-based vaccine, wherein the antigen-based vaccine comprises:
1) at least one MHC class I epitope expressed by a HIV subtype, wherein the HIV subtype is HIV subtype J, or
2) a MHC class I epitope encoding nucleic acid sequence encoding the at least one MHC class I epitope,
wherein the at least one MHC class I epitope comprises a MHC class I epitope sequence comprising at least one HIV epitope selected from the group consisting of the sequences shown in SEQ ID NOs: 19389-21003.

183. A method for inducing an immune response in a subject with HIV, the method comprising administering to the subject an antigen-based vaccine, wherein the antigen-based vaccine comprises:
1) at least one MHC class I epitope expressed by a HIV subtype, wherein the HIV subtype is HIV subtype K, or
2) a MHC class I epitope encoding nucleic acid sequence encoding the at least one MHC class I epitope,
wherein the at least one MHC class I epitope comprises a MHC class I epitope sequence comprising at least one HIV epitope selected from the group consisting of the sequences shown in SEQ ID NOs: 21004-22349.

184. The method any of claims 160-183, wherein the subject expresses at least one HLA allele predicted or known to present the at least one MHC class I epitope sequence.

185. The method of any of claims 160-183, wherein the method further comprises:
prior to administering to the subject the antigen-based vaccine, determining that the subject is a candidate for receiving the antigen-based vaccine, wherein the determination comprises identifying that 1) the subject expresses an HLA allele known to or predicted to present the at least one MHC class I epitope and 2) the subject has been exposed to or is susceptible to exposure to the HIV subtype.

186. The method of any of claim 184 or 185, wherein the at least one HLA allele is selected from the group consisting of HLA alleles in Tables 35-45.

187. The method of any of claims 131-186, wherein the antigen-based vaccine comprises an antigen expression system.

188. The method of claim 187, wherein the antigen expression system comprises any one of the antigen expression systems in any one of claims 10-104.

189. The method of any of claims 131-188, wherein the antigen-based vaccine comprises any one of the pharmaceutical compositions in any one of claims 105-106.

190. The composition of any one of claims 1-9, wherein each MHC class I epitope comprises at least one HIV epitope selected from the group consisting of the sequences shown in SEQ ID NOs: 325-2165.

191. The composition of claim 1-9, wherein each MHC class I epitope comprises at least one HIV epitope selected from the group consisting of the sequences shown in SEQ ID NOs: 2166-4106.

192. The composition of any one of claims 1-9, wherein each MHC class I epitope comprises at least one HIV epitope selected from the group consisting of the sequences shown in SEQ ID NOs: 4107-6241.

193. The composition of any one of claims 1-9, wherein each MHC class I epitope comprises at least one HIV epitope selected from the group consisting of the sequences shown in SEQ ID NOs: 6242-8389.

194. The composition of any one of claims 1-9, wherein each MHC class I epitope comprises at least one HIV epitope selected from the group consisting of the sequences shown in SEQ ID NOs: 8930-10626.

195. The composition of any one of claims 1-9, wherein each MHC class I epitope comprises at least one HIV epitope selected from the group consisting of the sequences shown in SEQ ID NOs: 10627-12810.

196. The composition of any one of claims 1-9, wherein each MHC class I epitope comprises at least one HIV epitope selected from the group consisting of the sequences shown in SEQ ID NOs: 12811-15079.

197. The composition of any one of claims 1-9, wherein each MHC class I epitope comprises at least one HIV epitope selected from the group consisting of the sequences shown in SEQ ID NOs: 15080-17174.

198. The composition of any one of claims 1-9, wherein each MHC class I epitope comprises at least one HIV epitope selected from the group consisting of the sequences shown in SEQ ID NOs: 17175-19388.

199. The composition of any one of claims 1-9, wherein each MHC class I epitope comprises at least one HIV epitope selected from the group consisting of the sequences shown in SEQ ID NOs: 19389-21003.

200. The composition of any one of claims 1-9, wherein each MHC class I epitope comprises at least one HIV epitope selected from the group consisting of the sequences shown in SEQ ID NOs: 21004-22349.

201. A method of assessing a subject having HIV, comprising the steps of:
a) determining or having determined that the subject expresses a HLA allele;
b) obtaining or having obtained sequencing data of HIV present in that subject;
c) selecting candidate epitope sequences for inclusion in an antigen-based vaccine, wherein a first candidate epitope sequence comprises at least one HIV epitope selected from the group consisting of the sequences shown in SEQ ID Nos: 325-22349, and wherein a second candidate epitope sequence is a mutated epitope sequence, each of the first and second candidate epitope sequences predicted to be presented by the HLA allele expressed by the subject;
d) generating the antigen-based vaccine including the selected candidate epitope sequences; and
e) optionally, administering or having administered the antigen-based vaccine to the subject.

202. A method for treating a subject having HIV, comprising the steps of:
a) determining or having determined that the subject expresses a HLA allele;
b) obtaining or having obtained sequencing data of HIV present in that subject;
c) selecting candidate epitope sequences for inclusion in an antigen-based vaccine, wherein a first candidate epitope sequence comprises at least one HIV epitope selected from the group consisting of the sequences shown in SEQ ID Nos: 325-22349, and wherein a second candidate epitope sequence is a mutated epitope sequence, each of the first and second candidate epitope sequences predicted to be presented by the HLA allele expressed by the subject;
d) generating the antigen-based vaccine including the selected candidate epitope sequences; and
e) optionally, administering or having administered the antigen-based vaccine to the subject.

203. The method of any one of claim 1-8 or 131-202, wherein epitope sequences of any one of SEQ ID Nos: 325-22349 are identified by applying a presentation model trained on HLA presented peptides sequenced by mass spectrometry.

204. The method of claim 203, wherein the presentation model exhibits a precision value of 0.28 at a 40% recall rate.

205. The method of claim 203, wherein the presentation model exhibits an AUC of 0.24.

The application's sequence listing, which the Patent Office published only in electronic form, follows.

SEQUENCE LISTING (22349 sequences)

SEQ ID NO: 1 - DNA, 36519 bp, Artificial Sequence
  Description of Artificial Sequence: Synthetic polynucleotide
ccatcttcaataatatacctcaaactttttgtgcgcgttaatatgcaaatgaggcgtttgaatttggggaggaagggcggtgattggtcgagggatgagcgaccgttaggggcggggcgagtgacgttttgatgacgtggttgcgaggaggagccagtttgcaagttctcgtgggaaaagtgacgtcaaacgaggtgtggtttgaacacggaaatactcaattttcccgcgctctctgacaggaaatgaggtgtttctgggcggatgcaagtgaaaacgggccattttcgcgcgaaaactgaatgaggaagtgaaaatctgagtaatttcgcgtttatggcagggaggagtatttgccgagggccgagtagactttgaccgattacgtgggggtttcgattaccgtgtttttcacctaaatttccgcgtacggtgtcaaagtccggtgtttttacgtaggtgtcagctgatcgccagggtatttaaacctgcgctctccagtcaagaggccactcttgagtgccagcgagaagagttttctcctccgcgccgcgagtcagatctacactttgaaagatgaggcacctgagagacctgcccgatgagaaaatcatcatcgcttccgggaacgagattctggaactggtggtaaatgccatgatgggcgacgaccctccggagccccccaccccatttgagacaccttcgctgcacgatttgtatgatctggaggtggatgtgcccgaggacgatcccaatgaggaggcggtaaatgatttttttagcgatgccgcgctgctagctgccgaggaggcttcgagctctagctcagacagcgactcttcactgcatacccctagacccggcagaggtgagaaaaagatccccgagcttaaaggggaagagatggacttgcgctgctatgaggaatgcttgcccccgagcgatgatgaggacgagcaggcgatccagaacgcagcgagccagggagtgcaagccgccagcgagagctttgcgctggactgcccgcctctgcccggacacggctgtaagtcttgtgaatttcatcgcatgaatactggagataaagctgtgttgtgtgcactttgctatatgagagcttacaaccattgtgtttacagtaagtgtgattaagttgaactttagagggaggcagagagcagggtgactgggcgatgactggtttatttatgtatatatgttctttatataggtcccgtctctgacgcagatgatgagacccccactacaaagtccacttcgtcacccccagaaattggcacatctccacctgagaatattgttagaccagttcctgttagagccactgggaggagagcagctgtggaatgtttggatgacttgctacagggtggggttgaacctttggacttgtgtacccggaaacgccccaggcactaagtgccacacatgtgtgtttacttgaggtgatgtcagtatttatagggtgtggagtgcaataaaaaatgtgttgactttaagtgcgtggtttatgactcaggggtggggactgtgagtatataagcaggtgcagacctgtgtggttagctcagagcggcatggagatttggacggtcttggaagactttcacaagactagacagctgctagagaacgcctcgaacggagtctcttacctgtggagattctgcttcggtggcgacctagctaggctagtctacagggccaaacaggattatagtgaacaatttgaggttattttgagagagtgttctggtctttttgacgctcttaacttgggccatcagtctcactttaaccagaggatttcgagagcccttgattttactactcctggcagaaccactgcagcagtagccttttttgcttttattcttgacaaatggagtcaagaaacccatttcagcagggattaccagctggatttcttagcagtagctttgtggagaacatggaagtgccagcgcctgaatgcaatctccggctacttgccggtacagccgctagacactctgaggatcctgaatctccaggagagtcccagggcacgccaacgtcgccagcagcagcagcaggaggaggatcaagaagagaacccgagagccggcctggaccctccggcggaggaggaggagtagctgacctgtttcctgaactgcgccgggtgctgactaggtcttcgagtggtcgggagagggggattaagcgggagaggcatgatgagactaatcacagaactgaactgactgtgggtctgatgagtcgcaagcgcccagaaacagtgtggtggcatgaggtgcagtcgactggcacagatgaggtgtcggtgatgcatgagaggttttctctagaacaagtcaagacttgttggttagagcctgaggatgattgggaggtagccatcaggaattatgccaagctggctctgaggccagacaagaagtacaagattactaagctgataaatatcagaaatgcctgctacatctcagggaatggggctgaagtggagatctgtctccaggaaagggtggctttcagatgctgcatgatgaatatgtacccgggagtggtgggcatggatggggttacctttatgaacatgaggttcaggggagatgggtataatggcacggtctttatggccaataccaagctgacagtccatggctgctccttctttgggtttaataacacctgcatcgaggcctggggtcaggtcggtgtgaggggctgcagtttttcagccaactggatgggggtcgtgggcaggaccaagagtatgctgtccgtgaagaaatgcttgtttgagaggtgccacctgggggtgatgagcgagggcgaagccagaatccgccactgcgcctctaccgagacgggctgctttgtgctgtgcaagggcaatgctaagatcaagcataatatgatctgtggagcctcggacgagcgcggctaccagatgctgacctgcgccggcgggaacagccatatgctggccaccgtacatgtggcttcccatgctcgcaagccctggcccgagttcgagcacaatgtcatgaccaggtgcaatatgcatctggggtcccgccgaggcatgttcatgccctaccagtgcaacctgaattatgtgaaggtgctgctggagcccgatgccatgtccagagtgagcctgacgggggtgtttgacatgaatgtggaggtgtggaagattctgagatatgatgaatccaagaccaggtgccgagcctgcgagtgcggagggaagcatgccaggttccagcccgtgtgtgtggatgtgacggaggacctgcgacccgatcatttggtgttgccctgcaccgggacggagttcggttccagcggggaagaatctgactagagtgagtagtgttctggggcgggggaggacctgcatgagggccagaataactgaaatctgtgcttttctgtgtgttgcagcagcatgagcggaagcggctcctttgagggaggggtattcagcccttatctgacggggcgtctcccctcctgggcgggagtgcgtcagaatgtgatgggatccacggtggacggccggcccgtgcagcccgcgaactcttcaaccctgacctatgcaaccctgagctcttcgtcgttggacgcagctgccgccgcagctgctgcatctgccgccagcgccgtgcgcggaatggccatgggcgccggctactacggcactctggtggccaactcgagttccaccaataatcccgccagcctgaacgaggagaagctgttgctgctgatggcccagctcgaggccttgacccagcgcctgggcgagctgacccagcaggtggctcagctgcaggagcagacgcgggccgcggttgccacggtgaaatccaaataaaaaatgaatcaataaataaacggagacggttgttgattttaacacagagtctgaatctttatttgatttttcgcgcgcggtaggccctggaccaccggtctcgatcattgagcacccggtggatcttttccaggacccggtagaggtgggcttggatgttgaggtacatgggcatgagcccgtcccgggggtggaggtagctccattgcagggcctcgtgctcgggggtggtgttgtaaatcacccagtcatagcaggggcgcagggcatggtgttgcacaatatctttgaggaggagactgatggccacgggcagccctttggtgtaggtgtttacaaatctgttgagctgggagggatgcatgcggggggagatgaggtgcatcttggcctggatcttgagattggcgatgttaccgcccagatcccgcctggggttcatgttgtgcaggaccaccagcacggtgtatccggtgcacttggggaatttatcatgcaacttggaagggaaggcgtgaaagaatttggcgacgcctttgtgcccgcccaggttttccatgcactcatccatgatgatggcgatgggcccgtgggcggcggcctgggcaaagacgtttcgggggtcggacacatcatagttgtggtcctgggtgaggtcatcataggccattttaatgaatttggggcggagggtgccggactgggggacaaaggtaccctcgatcccgggggcgtagttcccctcacagatctgcatctcccaggctttgagctcggagggggggatcatgtccacctgcggggcgataaagaacacggtttccggggcgggggagatgagctgggccgaaagcaagttccggagcagctgggacttgccgcagccggtggggccgtagatgaccccgatgaccggctgcaggtggtagttgagggagagacagctgccgtcctcccggaggaggggggccacctcgttcatcatctcgcgcacgtgcatgttctcgcgcaccagttccgccaggaggcgctctccccccagggataggagctcctggagcgaggcgaagtttttcagcggcttgagtccgtcggccatgggcattttggagagggtttgttgcaagagttccaggcggtcccagagctcggtgatgtgctctacggcatctcgatccagcagacctcctcgtttcgcgggttgggacggctgcgggagtagggcaccagacgatgggcgtccagcgcagccagggtccggtccttccagggtcgcagcgtccgcgtcagggtggtctccgtcacggtgaaggggtgcgcgccgggctgggcgcttgcgagggtgcgcttcaggctcatccggctggtcgaaaaccgctcccgatcggcgccctgcgcgtcggccaggtagcaattgaccatgagttcgtagttgagcgcctcggccgcgtggcctttggcgcggagcttacctttggaagtctgcccgcaggcgggacagaggagggacttgagggcgtagagcttgggggcgaggaagacggactcgggggcgtaggcgtccgcgccgcagtgggcgcagacggtctcgcactccacgagccaggtgaggtcgggctggtcggggtcaaaaaccagtttcccgccgttctttttgatgcgtttcttacctttggtctccatgagctcgtgtccccgctgggtgacaaagaggctgtccgtgtccccgtagaccgactttatgggccggtcctcgagcggtgtgccgcggtcctcctcgtagaggaaccccgcccactccgagacgaaagcccgggtccaggccagcacgaaggaggccacgtgggacgggtagcggtcgttgtccaccagcgggtccaccttttccagggtatgcaaacacatgtccccctcgtccacatccaggaaggtgattggcttgtaagtgtaggccacgtgaccgggggtcccggccgggggggtataaaagggtgcgggtccctgctcgtcctcactgtcttccggatcgctgtccaggagcgccagctgttggggtaggtattccctctcgaaggcgggcatgacctcggcactcaggttgtcagtttctagaaacgaggaggatttgatattgacggtgccggcggagatgcctttcaagagcccctcgtccatctggtcagaaaagacgatctttttgttgtcgagcttggtggcgaaggagccgtagagggcgttggagaggagcttggcgatggagcgcatggtctggtttttttccttgtcggcgcgctccttggcggcgatgttgagctgcacgtactcgcgcgccacgcacttccattcggggaagacggtggtcagctcgtcgggcacgattctgacctgccagccccgattatgcagggtgatgaggtccacactggtggccacctcgccgcgcaggggctcattagtccagcagaggcgtccgcccttgcgcgagcagaaggggggcagggggtccagcatgacctcgtcgggggggtcggcatcgatggtgaagatgccgggcaggaggtcggggtcaaagtagctgatggaagtggccagatcgtccagggcagcttgccattcgcgcacggccagcgcgcgctcgtagggactgaggggcgtgccccagggcatgggatgggtaagcgcggaggcgtacatgccgcagatgtcgtagacgtagaggggctcctcgaggatgccgatgtaggtggggtagcagcgccccccgcggatgctggcgcgcacgtagtcatacagctcgtgcgagggggcgaggagccccgggcccaggttggtgcgactgggcttttcggcgcggtagacgatctggcggaaaatggcatgcgagttggaggagatggtgggcctttggaagatgttgaagtgggcgtggggcagtccgaccgagtcgcggatgaagtgggcgtaggagtcttgcagcttggcgacgagctcggcggtgactaggacgtccagagcgcagtagtcgagggtctcctggatgatgtcatacttgagctgtcccttttgtttccacagctcgcggttgagaaggaactcttcgcggtccttccagtactcttcgagggggaacccgtcctgatctgcacggtaagagcctagcatgtagaactggttgacggccttgtaggcgcagcagcccttctccacggggagggcgtaggcctgggcggccttgcgcagggaggtgtgcgtgagggcgaaagtgtccctgaccatgaccttgaggaactggtgcttgaagtcgatatcgtcgcagcccccctgctcccagagctggaagtccgtgcgcttcttgtaggcggggttgggcaaagcgaaagtaacatcgttgaagaggatcttgcccgcgcggggcataaagttgcgagtgatgcggaaaggttggggcacctcggcccggttgttgatgacctgggcggcgagcacgatctcgtcgaagccgttgatgttgtggcccacgatgtagagttccacgaatcgcggacggcccttgacgtggggcagtttcttgagctcctcgtaggtgagctcgtcggggtcgctgagcccgtgctgctcgagcgcccagtcggcgagatgggggttggcgcggaggaaggaagtccagagatccacggccagggcggtttgcagacggtcccggtactgacggaactgctgcccgacggccattttttcgggggtgacgcagtagaaggtgcgggggtccccgtgccagcgatcccatttgagctggagggcgagatcgagggcgagctcgacgagccggtcgtccccggagagtttcatgaccagcatgaaggggacgagctgcttgccgaaggaccccatccaggtgtaggtttccacatcgtaggtgaggaagagcctttcggtgcgaggatgcgagccgatggggaagaactggatctcctgccaccaattggaggaatggctgttgatgtgatggaagtagaaatgccgacggcgcgccgaacactcgtgcttgtgtttatacaagcggccacagtgctcgcaacgctgcacgggatgcacgtgctgcacgagctgtacctgagttcctttgacgaggaatttcagtgggaagtggagtcgtggcgcctgcatctcgtgctgtactacgtcgtggtggtcggcctggccctcttctgcctcgatggtggtcatgctgacgagcccgcgcgggaggcaggtccagacctcggcgcgagcgggtcggagagcgaggacgagggcgcgcaggccggagctgtccagggtcctgagacgctgcggagtcaggtcagtgggcagcggcggcgcgcggttgacttgcaggagtttttccagggcgcgcgggaggtccagatggtacttgatctccaccgcgccattggtggcgacgtcgatggcttgcagggtcccgtgcccctggggtgtgaccaccgtcccccgtttcttcttgggcggctggggcgacgggggcggtgcctcttccatggttagaagcggcggcgaggacgcgcgccgggcggcaggggcggctcggggcccggaggcaggggcggcaggggcacgtcggcgccgcgcgcgggtaggttctggtactgcgcccggagaagactggcgtgagcgacgacgcgacggttgacgtcctggatctgacgcctctgggtgaaggccacgggacccgtgagtttgaacctgaaagagagttcgacagaatcaatctcggtatcgttgacggcggcctgccgcaggatctcttgcacgtcgcccgagttgtcctggtaggcgatctcggtcatgaactgctcgatctcctcctcttgaaggtctccgcggccggcgcgctccacggtggccgcgaggtcgttggagatgcggcccatgagctgcgagaaggcgttcatgcccgcctcgttccagacgcggctgtagaccacgacgccctcgggatcgcgggcgcgcatgaccacctgggcgaggttgagctccacgtggcgcgtgaagaccgcgtagttgcagaggcgctggtagaggtagttgagcgtggtggcgatgtgctcggtgacgaagaaatacatgatccagcggcggagcggcatctcgctgacgtcgcccagcgcctccaaacgttccatggcctcgtaaaagtccacggcgaagttgaaaaactgggagttgcgcgccgagacggtcaactcctcctccagaagacggatgagctcggcgatggtggcgcgcacctcgcgctcgaaggcccccgggagttcctccacttcctcttcttcctcctccactaacatctcttctacttcctcctcaggcggcagtggtggcgggggagggggcctgcgtcgccggcggcgcacgggcagacggtcgatgaagcgctcgatggtctcgccgcgccggcgtcgcatggtctcggtgacggcgcgcccgtcctcgcggggccgcagcgtgaagacgccgccgcgcatctccaggtggccgggggggtccccgttgggcagggagagggcgctgacgatgcatcttatcaattgccccgtagggactccgcgcaaggacctgagcgtctcgagatccacgggatctgaaaaccgctgaacgaaggcttcgagccagtcgcagtcgcaaggtaggctgagcacggtttcttctggcgggtcatgttggttgggagcggggcgggcgatgctgctggtgatgaagttgaaataggcggttctgagacggcggatggtggcgaggagcaccaggtctttgggcccggcttgctggatgcgcagacggtcggccatgccccaggcgtggtcctgacacctggccaggtccttgtagtagtcctgcatgagccgctccacgggcacctcctcctcgcccgcgcggccgtgcatgcgcgtgagcccgaagccgcgctggggctggacgagcgccaggtcggcgacgacgcgctcggcgaggatggcttgctggatctgggtgagggtggtctggaagtcatcaaagtcgacgaagcggtggtaggctccggtgttgatggtgtaggagcagttggccatgacggaccagttgacggtctggtggcccggacgcacgagctcgtggtacttgaggcgcgagtaggcgcgcgtgtcgaagatgtagtcgttgcaggtgcgcaccaggtactggtagccgatgaggaagtgcggcggcggctggcggtagagcggccatcgctcggtggcgggggcgccgggcgcgaggtcctcgagcatggtgcggtggtagccgtagatgtacctggacatccaggtgatgccggcggcggtggtggaggcgcgcgggaactcgcggacgcggttccagatgttgcgcagcggcaggaagtagttcatggtgggcacggtctggcccgtgaggcgcgcgcagtcgtggatgctctatacgggcaaaaacgaaagcggtcagcggctcgactccgtggcctggaggctaagcgaacgggttgggctgcgcgtgtaccccggttcgaatctcgaatcaggctggagccgcagctaacgtggtattggcactcccgtctcgacccaagcctgcaccaaccctccaggatacggaggcgggtcgttttgcaacttttttttggaggccggatgagactagtaagcgcggaaagcggccgaccgcgatggctcgctgccgtagtctggagaagaatcgccagggttgcgttgcggtgtgccccggttcgaggccggccggattccgcggctaacgagggcgtggctgccccgtcgtttccaagaccccatagccagccgacttctccagttacggagcgagcccctcttttgttttgtttgtttttgccagatgcatcccgtactgcggcagatgcgcccccaccaccctccaccgcaacaacagccccctccacagccggcgcttctgcccccgccccagcagcaacttccagccacgaccgccgcggccgccgtgagcggggctggacagagttatgatcaccagctggccttggaagagggcgaggggctggcgcgcctgggggcgtcgtcgccggagcggcacccgcgcgtgcagatgaaaagggacgctcgcgaggcctacgtgcccaagcagaacctgttcagagacaggagcggcgaggagcccgaggagatgcgcgcggcccggttccacgcggggcgggagctgcggcgcggcctggaccgaaagagggtgctgagggacgaggatttcgaggcggacgagctgacggggatcagccccgcgcgcgcgcacgtggccgcggccaacctggtcacggcgtacgagcagaccgtgaaggaggagagcaacttccaaaaatccttcaacaaccacgtgcgcaccctgatcgcgcgcgaggaggtgaccctgggcctgatgcacctgtgggacctgctggaggccatcgtgcagaaccccaccagcaagccgctgacggcgcagctgttcctggtggtgcagcatagtcgggacaacgaagcgttcagggaggcgctgctgaatatcaccgagcccgagggccgctggctcctggacctggtgaacattctgcagagcatcgtggtgcaggagcgcgggctgccgctgtccgagaagctggcggccatcaacttctcggtgctgagtttgggcaagtactacgctaggaagatctacaagaccccgtacgtgcccatagacaaggaggtgaagatcgacgggttttacatgcgcatgaccctgaaagtgctgaccctgagcgacgatctgggggtgtaccgcaacgacaggatgcaccgtgcggtgagcgccagcaggcggcgcgagctgagcgaccaggagctgatgcatagtctgcagcgggccctgaccggggccgggaccgagggggagagctactttgacatgggcgcggacctgcactggcagcccagccgccgggccttggaggcggcggcaggaccctacgtagaagaggtggacgatgaggtggacgaggagggcgagtacctggaagactgatggcgcgaccgtatttttgctagatgcaacaacaacagccacctcctgatcccgcgatgcgggcggcgctgcagagccagccgtccggcattaactcctcggacgattggacccaggccatgcaacgcatcatggcgctgacgacccgcaaccccgaagcctttagacagcagccccaggccaaccggctctcggccatcctggaggccgtggtgccctcgcgctccaaccccacgcacgagaaggtcctggccatcgtgaacgcgctggtggagaacaaggccatccgcggcgacgaggccggcctggtgtacaacgcgctgctggagcgcgtggcccgctacaacagcaccaacgtgcagaccaacctggaccgcatggtgaccgacgtgcgcgaggccgtggcccagcgcgagcggttccaccgcgagtccaacctgggatccatggtggcgctgaacgccttcctcagcacccagcccgccaacgtgccccggggccaggaggactacaccaacttcatcagcgccctgcgcctgatggtgaccgaggtgccccagagcgaggtgtaccagtccgggccggactacttcttccagaccagtcgccagggcttgcagaccgtgaacctgagccaggctttcaagaacttgcagggcctgtggggcgtgcaggccccggtcggggaccgcgcgacggtgtcgagcctgctgacgccgaactcgcgcctgctgctgctgctggtggcccccttcacggacagcggcagcatcaaccgcaactcgtacctgggctacctgattaacctgtaccgcgaggccatcggccaggcgcacgtggacgagcagacctaccaggagatcacccacgtgagccgcgccctgggccaggacgacccgggcaacctggaagccaccctgaactttttgctgaccaaccggtcgcagaagatcccgccccagtacgcgctcagcaccgaggaggagcgcatcctgcgttacgtgcagcagagcgtgggcctgttcctgatgcaggagggggccacccccagcgccgcgctcgacatgaccgcgcgcaacatggagcccagcatgtacgccagcaaccgcccgttcatcaataaactgatggactacttgcatcgggcggccgccatgaactctgactatttcaccaacgccatcctgaatccccactggctcccgccgccggggttctacacgggcgagtacgacatgcccgaccccaatgacgggttcctgtgggacgatgtggacagcagcgtgttctccccccgaccgggtgctaacgagcgccccttgtggaagaaggaaggcagcgaccgacgcccgtcctcggcgctgtccggccgcgagggtgctgccgcggcggtgcccgaggccgccagtcctttcccgagcttgcccttctcgctgaacagtatccgcagcagcgagctgggcaggatcacgcgcccgcgcttgctgggcgaagaggagtacttgaatgactcgctgttgagacccgagcgggagaagaacttccccaataacgggatagaaagcctggtggacaagatgagccgctggaagacgtatgcgcaggagcacagggacgatccccgggcgtcgcagggggccacgagccggggcagcgccgcccgtaaacgccggtggcacgacaggcagcggggacagatgtgggacgatgaggactccgccgacgacagcagcgtgttggacttgggtgggagtggtaacccgttcgctcacctgcgcccccgtatcgggcgcatgatgtaagagaaaccgaaaataaatgatactcaccaaggccatggcgaccagcgtgcgttcgtttcttctctgttgttgttgtatctagtatgatgaggcgtgcgtacccggagggtcctcctccctcgtacgagagcgtgatgcagcaggcgatggcggcggcggcgatgcagcccccgctggaggctccttacgtgcccccgcggtacctggcgcctacggaggggcggaacagcattcgttactcggagctggcacccttgtacgataccacccggttgtacctggtggacaacaagtcggcggacatcgcctcgctgaactaccagaacgaccacagcaacttcctgaccaccgtggtgcagaacaatgacttcacccccacggaggccagcacccagaccatcaactttgacgagcgctcgcggtggggcggccagctgaaaaccatcatgcacaccaacatgcccaacgtgaacgagttcatgtacagcaacaagttcaaggcgcgggtgatggtctcccgcaagacccccaatggggtgacagtgacagaggattatgatggtagtcaggatgagctgaagtatgaatgggtggaatttgagctgcccgaaggcaacttctcggtgaccatgaccatcgacctgatgaacaacgccatcatcgacaattacttggcggtggggcggcagaacggggtgctggagagcgacatcggcgtgaagttcgacactaggaacttcaggctgggctgggaccccgtgaccgagctggtcatgcccggggtgtacaccaacgaggctttccatcccgatattgtcttgctgcccggctgcggggtggacttcaccgagagccgcctcagcaacctgctgggcattcgcaagaggcagcccttccaggaaggcttccagatcatgtacgaggatctggaggggggcaacatccccgcgctcctggatgtcgacgcctatgagaaaagcaaggaggatgcagcagctgaagcaactgcagccgtagctaccgcctctaccgaggtcaggggcgataattttgcaagcgccgcagcagtggcagcggccgaggcggctgaaaccgaaagtaagatagtcattcagccggtggagaaggatagcaagaacaggagctacaacgtactaccggacaagataaacaccgcctaccgcagctggtacctagcctacaactatggcgaccccgagaagggcgtgcgctcctggacgctgctcaccacctcggacgtcacctgcggcgtggagcaagtctactggtcgctgcccgacatgatgcaagacccggtcaccttccgctccacgcgtcaagttagcaactacccggtggtgggcgccgagctcctgcccgtctactccaagagcttcttcaacgagcaggccgtctactcgcagcagctgcgcgccttcacctcgcttacgcacgtcttcaaccgcttccccgagaaccagatcctcgtccgcccgcccgcgcccaccattaccaccgtcagtgaaaacgttcctgctctcacagatcacgggaccctgccgctgcgcagcagtatccggggagtccagcgcgtgaccgttactgacgccagacgccgcacctgcccctacgtctacaaggccctgggcatagtcgcgccgcgcgtcctctcgagccgcaccttctaaatgtccattctcatctcgcccagtaataacaccggttggggcctgcgcgcgcccagcaagatgtacggaggcgctcgccaacgctccacgcaacaccccgtgcgcgtgcgcgggcacttccgcgctccctggggcgccctcaagggccgcgtgcggtcgcgcaccaccgtcgacgacgtgatcgaccaggtggtggccgacgcgcgcaactacacccccgccgccgcgcccgtctccaccgtggacgccgtcatcgacagcgtggtggccgacgcgcgccggtacgcccgcgccaagagccggcggcggcgcatcgcccggcggcaccggagcacccccgccatgcgcgcggcgcgagccttgctgcgcagggccaggcgcacgggacgcagggccatgctcagggcggccagacgcgcggcttcaggcgccagcgccggcaggacccggagacgcgcggccacggcggcggcagcggccatcgccagcatgtcccgcccgcggcgagggaacgtgtactgggtgcgcgacgccgccaccggtgtgcgcgtgcccgtgcgcacccgcccccctcgcacttgaagatgttcacttcgcgatgttgatgtgtcccagcggcgaggaggatgtccaagcgcaaattcaaggaagagatgctccaggtcatcgcgcctgagatctacggccctgcggtggtgaaggaggaaagaaagccccgcaaaatcaagcgggtcaaaaaggacaaaaaggaagaagaaagtgatgtggacggattggtggagtttgtgcgcgagttcgccccccggcggcgcgtgcagtggcgcgggcggaaggtgcaaccggtgctgagacccggcaccaccgtggtcttcacgcccggcgagcgctccggcaccgcttccaagcgctcctacgacgaggtgtacggggatgatgatattctggagcaggcggccgagcgcctgggcgagtttgcttacggcaagcgcagccgttccgcaccgaaggaagaggcggtgtccatcccgctggaccacggcaaccccacgccgagcctcaagcccgtgaccttgcagcaggtgctgccgaccgcggcgccgcgccgggggttcaagcgcgagggcgaggatctgtaccccaccatgcagctgatggtgcccaagcgccagaagctggaagacgtgctggagaccatgaaggtggacccggacgtgcagcccgaggtcaaggtgcggcccatcaagcaggtggccccgggcctgggcgtgcagaccgtggacatcaagattcccacggagcccatggaaacgcagaccgagcccatgatcaagcccagcaccagcaccatggaggtgcagacggatccctggatgccatcggctcctagtcgaagaccccggcgcaagtacggcgcggccagcctgctgatgcccaactacgcgctgcatccttccatcatccccacgccgggctaccgcggcacgcgcttctaccgcggtcataccagcagccgccgccgcaagaccaccactcgccgccgccgtcgccgcaccgccgctgcaaccacccctgccgccctggtgcggagagtgtaccgccgcggccgcgcacctctgaccctgccgcgcgcgcgctaccacccgagcatcgccatttaaactttcgcctgctttgcagatcaatggccctcacatgccgccttcgcgttcccattacgggctaccgaggaagaaaaccgcgccgtagaaggctggcggggaacgggatgcgtcgccaccaccaccggcggcggcgcgccatcagcaagcggttggggggaggcttcctgcccgcgctgatccccatcatcgccgcggcgatcggggcgatccccggcattgcttccgtggcggtgcaggcctctcagcgccactgagacacacttggaaacatcttgtaataaaccaatggactctgacgctcctggtcctgtgatgtgttttcgtagacagatggaagacatcaatttttcgtccctggctccgcgacacggcacgcggccgttcatgggcacctggagcgacatcggcaccagccaactgaacgggggcgccttcaattggagcagtctctggagcgggcttaagaatttcgggtccacgcttaaaacctatggcagcaaggcgtggaacagcaccacagggcaggcgctgagggataagctgaaagagcagaacttccagcagaaggtggtcgatgggctcgcctcgggcatcaacggggtggtggacctggccaaccaggccgtgcagcggcagatcaacagccgcctggacccggtgccgcccgccggctccgtggagatgccgcaggtggaggaggagctgcctcccctggacaagcggggcgagaagcgaccccgccccgatgcggaggagacgctgctgacgcacacggacgagccgcccccgtacgaggaggcggtgaaactgggtctgcccaccacgcggcccatcgcgcccctggccaccggggtgctgaaacccgaaaagcccgcgaccctggacttgcctcctccccagccttcccgcccctctacagtggctaagcccctgccgccggtggccgtggcccgcgcgcgacccgggggcaccgcccgccctcatgcgaactggcagagcactctgaacagcatcgtgggtctgggagtgcagagtgtgaagcgccgccgctgctattaaacctaccgtagcgcttaacttgcttgtctgtgtgtgtatgtattatgtcgccgccgccgctgtccaccagaaggaggagtgaagaggcgcgtcgccgagttgcaagatggccaccccatcgatgctgccccagtgggcgtacatgcacatcgccggacaggacgcttcggagtacctgagtccgggtctggtgcagtttgcccgcgccacagacacctacttcagtctggggaacaagtttaggaaccccacggtggcgcccacgcacgatgtgaccaccgaccgcagccagcggctgacgctgcgcttcgtgcccgtggaccgcgaggacaacacctactcgtacaaagtgcgctacacgctggccgtgggcgacaaccgcgtgctggacatggccagcacctactttgacatccgcggcgtgctggatcggggccctagcttcaaaccctactccggcaccgcctacaacagtctggcccccaagggagcacccaacacttgtcagtggacatataaagccgatggtgaaactgccacagaaaaaacctatacatatggaaatgcacccgtgcagggcattaacatcacaaaagatggtattcaacttggaactgacaccgatgatcagccaatctacgcagataaaacctatcagcctgaacctcaagtgggtgatgctgaatggcatgacatcactggtactgatgaaaagtatggaggcagagctcttaagcctgataccaaaatgaagccttgttatggttcttttgccaagcctactaataaagaaggaggtcaggcaaatgtgaaaacaggaacaggcactactaaagaatatgacatagacatggctttctttgacaacagaagtgcggctgctgctggcctagctccagaaattgttttgtatactgaaaatgtggatttggaaactccagatacccatattgtatacaaagcaggcacagatgacagcagctcttctattaatttgggtcagcaagccatgcccaacagacctaactacattggtttcagagacaactttatcgggctcatgtactacaacagcactggcaatatgggggtgctggccggtcaggcttctcagctgaatgctgtggttgacttgcaagacagaaacaccgagctgtcctaccagctcttgcttgactctctgggtgacagaacccggtatttcagtatgtggaatcaggcggtggacagctatgatcctgatgtgcgcattattgaaaatcatggtgtggaggatgaacttcccaactattgtttccctctggatgctgttggcagaacagatacttatcagggaattaaggctaatggaactgatcaaaccacatggaccaaagatgacagtgtcaatgatgctaatgagataggcaagggtaatccattcgccatggaaatcaacatccaagccaacctgtggaggaacttcctctacgccaacgtggccctgtacctgcccgactcttacaagtacacgccggccaatgttaccctgcccaccaacaccaacacctacgattacatgaacggccgggtggtggcgccctcgctggtggactcctacatcaacatcggggcgcgctggtcgctggatcccatggacaacgtgaaccccttcaaccaccaccgcaatgcggggctgcgctaccgctccatgctcctgggcaacgggcgctacgtgcccttccacatccaggtgccccagaaatttttcgccatcaagagcctcctgctcctgcccgggtcctacacctacgagtggaacttccgcaaggacgtcaacatgatcctgcagagctccctcggcaacgacctgcgcacggacggggcctccatctccttcaccagcatcaacctctacgccaccttcttccccatggcgcacaacacggcctccacgctcgaggccatgctgcgcaacgacaccaacgaccagtccttcaacgactacctctcggcggccaacatgctctaccccatcccggccaacgccaccaacgtgcccatctccatcccctcgcgcaactgggccgccttccgcggctggtccttcacgcgtctcaagaccaaggagacgccctcgctgggctccgggttcgacccctacttcgtctactcgggctccatcccctacctcgacggcaccttctacctcaaccacaccttcaagaaggtctccatcaccttcgactcctccgtcagctggcccggcaacgaccggctcctgacgcccaacgagttcgaaatcaagcgcaccgtcgacggcgagggctacaacgtggcccagtgcaacatgaccaaggactggttcctggtccagatgctggcccactacaacatcggctaccagggcttctacgtgcccgagggctacaaggaccgcatgtactccttcttccgcaacttccagcccatgagccgccaggtggtggacgaggtcaactacaaggactaccaggccgtcaccctggcctaccagcacaacaactcgggcttcgtcggctacctcgcgcccaccatgcgccagggccagccctaccccgccaactacccctacccgctcatcggcaagagcgccgtcaccagcgtcacccagaaaaagttcctctgcgacagggtcatgtggcgcatccccttctccagcaacttcatgtccatgggcgcgctcaccgacctcggccagaacatgctctatgccaactccgcccacgcgctagacatgaatttcgaagtcgaccccatggatgagtccacccttctctatgttgtcttcgaagtcttcgacgtcgtccgagtgcaccagccccaccgcggcgtcatcgaggccgtctacctgcgcacccccttctcggccggtaacgccaccacctaagctcttgcttcttgcaagccatggccgcgggctccggcgagcaggagctcagggccatcatccgcgacctgggctgcgggccctacttcctgggcaccttcgataagcgcttcccgggattcatggccccgcacaagctggcctgcgccatcgtcaacacggccggccgcgagaccgggggcgagcactggctggccttcgcctggaacccgcgctcgaacacctgctacctcttcgaccccttcgggttctcggacgagcgcctcaagcagatctaccagttcgagtacgagggcctgctgcgccgcagcgccctggccaccgaggaccgctgcgtcaccctggaaaagtccacccagaccgtgcagggtccgcgctcggccgcctgcgggctcttctgctgcatgttcctgcacgccttcgtgcactggcccgaccgccccatggacaagaaccccaccatgaacttgctgacgggggtgcccaacggcatgctccagtcgccccaggtggaacccaccctgcgccgcaaccaggaggcgctctaccgcttcctcaactcccactccgcctactttcgctcccaccgcgcgcgcatcgagaaggccaccgccttcgaccgcatgaatcaagacatgtaaaccgtgtgtgtatgttaaatgtctttaataaacagcactttcatgttacacatgcatctgagatgatttatttagaaatcgaaagggttctgccgggtctcggcatggcccgcgggcagggacacgttgcggaactggtacttggccagccacttgaactcggggatcagcagtttgggcagcggggtgtcggggaaggagtcggtccacagcttccgcgtcagttgcagggcgcccagcaggtcgggcgcggagatcttgaaatcgcagttgggacccgcgttctgcgcgcgggagttgcggtacacggggttgcagcactggaacaccatcagggccgggtgcttcacgctcgccagcaccgtcgcgtcggtgatgctctccacgtcgaggtcctcggcgttggccatcccgaagggggtcatcttgcaggtctgccttcccatggtgggcacgcacccgggcttgtggttgcaatcgcagtgcagggggatcagcatcatctgggcctggtcggcgttcatccccgggtacatggccttcatgaaagcctccaattgcctgaacgcctgctgggccttggctccctcggtgaagaagaccccgcaggacttgctagagaactggttggtggcgcacccggcgtcgtgcacgcagcagcgcgcgtcgttgttggccagctgcaccacgctgcgcccccagcggttctgggtgatcttggcccggtcggggttctccttcagcgcgcgctgcccgttctcgctcgccacatccatctcgatcatgtgctccttctggatcatggtggtcccgtgcaggcaccgcagcttgccctcggcctcggtgcacccgtgcagccacagcgcgcacccggtgcactcccagttcttgtgggcgatctgggaatgcgcgtgcacgaagccctgcaggaagcggcccatcatggtggtcagggtcttgttgctagtgaaggtcagcggaatgccgcggtgctcctcgttgatgtacaggtggcagatgcggcggtacacctcgccctgctcgggcatcagctggaagttggctttcaggtcggtctccacgcggtagcggtccatcagcatagtcatgatttccatacccttctcccaggccgagacgatgggcaggctcatagggttcttcaccatcatcttagcgctagcagccgcggccagggggtcgctctcgtccagggtctcaaagctccgcttgccgtccttctcggtgatccgcaccggggggtagctgaagcccacggccgccagctcctcctcggcctgtctttcgtcctcgctgtcctggctgacgtcctgcaggaccacatgcttggtcttgcggggtttcttcttgggcggcagcggcggcggagatgttggagatggcgagggggagcgcgagttctcgctcaccactactatctcttcctcttcttggtccgaggccacgcggcggtaggtatgtctcttcgggggcagaggcggaggcgacgggctctcgccgccgcgacttggcggatggctggcagagccccttccgcgttcgggggtgcgctcccggcggcgctctgactgacttcctccgcggccggccattgtgttctcctagggaggaacaacaagcatggagactcagccatcgccaacctcgccatctgcccccaccgccgacgagaagcagcagcagcagaatgaaagcttaaccgccccgccgcccagccccgccacctccgacgcggccgtcccagacatgcaagagatggaggaatccatcgagattgacctgggctatgtgacgcccgcggagcacgaggaggagctggcagtgcgcttttcacaagaagagatacaccaagaacagccagagcaggaagcagagaatgagcagagtcaggctgggctcgagcatgacggcgactacctccacctgagcgggggggaggacgcgctcatcaagcatctggcccggcaggccaccatcgtcaaggatgcgctgctcgaccgcaccgaggtgcccctcagcgtggaggagctcagccgcgcctacgagttgaacctcttctcgccgcgcgtgccccccaagcgccagcccaatggcacctgcgagcccaacccgcgcctcaacttctacccggtcttcgcggtgcccgaggccctggccacctaccacatctttttcaagaaccaaaagatccccgtctcctgccgcgccaaccgcacccgcgccgacgcccttttcaacctgggtcccggcgcccgcctacctgatatcgcctccttggaagaggttcccaagatcttcgagggtctgggcagcgacgagactcgggccgcgaacgctctgcaaggagaaggaggagagcatgagcaccacagcgccctggtcgagttggaaggcgacaacgcgcggctggcggtgctcaaacgcacggtcgagctgacccatttcgcctacccggctctgaacctgccccccaaagtcatgagcgcggtcatggaccaggtgctcatcaagcgcgcgtcgcccatctccgaggacgagggcatgcaagactccgaggagggcaagcccgtggtcagcgacgagcagctggcccggtggctgggtcctaatgctagtccccagagtttggaagagcggcgcaaactcatgatggccgtggtcctggtgaccgtggagctggagtgcctgcgccgcttcttcgccgacgcggagaccctgcgcaaggtcgaggagaacctgcactacctcttcaggcacgggttcgtgcgccaggcctgcaagatctccaacgtggagctgaccaacctggtctcctacatgggcatcttgcacgagaaccgcctggggcagaacgtgctgcacaccaccctgcgcggggaggcccggcgcgactacatccgcgactgcgtctacctctacctctgccacacctggcagacgggcatgggcgtgtggcagcagtgtctggaggagcagaacctgaaagagctctgcaagctcctgcagaagaacctcaagggtctgtggaccgggttcgacgagcgcaccaccgcctcggacctggccgacctcattttccccgagcgcctcaggctgacgctgcgcaacggcctgcccgactttatgagccaaagcatgttgcaaaactttcgctctttcatcctcgaacgctccggaatcctgcccgccacctgctccgcgctgccctcggacttcgtgccgctgaccttccgcgagtgccccccgccgctgtggagccactgctacctgctgcgcctggccaactacctggcctaccactcggacgtgatcgaggacgtcagcggcgagggcctgctcgagtgccactgccgctgcaacctctgcacgccgcaccgctccctggcctgcaacccccagctgctgagcgagacccagatcatcggcaccttcgagttgcaagggcccagcgaaggcgagggttcagccgccaaggggggtctgaaactcaccccggggctgtggacctcggcctacttgcgcaagttcgtgcccgaggactaccatcccttcgagatcaggttctacgaggaccaatcccatccgcccaaggccgagctgtcggcctgcgtcatcacccagggggcgatcctggcccaattgcaagccatccagaaatcccgccaagaattcttgctgaaaaagggccgcggggtctacctcgacccccagaccggtgaggagctcaaccccggcttcccccaggatgccccgaggaaacaagaagctgaaagtggagctgccgcccgtggaggatttggaggaagactgggagaacagcagtcaggcagaggaggaggagatggaggaagactgggacagcactcaggcagaggaggacagcctgcaagacagtctggaggaagacgaggaggaggcagaggaggaggtggaagaagcagccgccgccagaccgtcgtcctcggcgggggagaaagcaagcagcacggataccatctccgctccgggtcggggtcccgctcgaccacacagtagatgggacgagaccggacgattcccgaaccccaccacccagaccggtaagaaggagcggcagggatacaagtcctggcgggggcacaaaaacgccatcgtctcctgcttgcaggcctgcgggggcaacatctccttcacccggcgctacctgctcttccaccgcggggtgaactttccccgcaacatcttgcattactaccgtcacctccacagcccctactacttccaagaagaggcagcagcagcagaaaaagaccagcagaaaaccagcagctagaaaatccacagcggcggcagcaggtggactgaggatcgcggcgaacgagccggcgcaaacccgggagctgaggaaccggatctttcccaccctctatgccatcttccagcagagtcgggggcaggagcaggaactgaaagtcaagaaccgttctctgcgctcgctcacccgcagttgtctgtatcacaagagcgaagaccaacttcagcgcactctcgaggacgccgaggctctcttcaacaagtactgcgcgctcactcttaaagagtagcccgcgcccgcccagtcgcagaaaaaggcgggaattacgtcacctgtgcccttcgccctagccgcctccacccatcatcatgagcaaagagattcccacgccttacatgtggagctaccagccccagatgggcctggccgccggtgccgcccaggactactccacccgcatgaattggctcagcgccgggcccgcgatgatctcacgggtgaatgacatccgcgcccaccgaaaccagatactcctagaacagtcagcgctcaccgccacgccccgcaatcacctcaatccgcgtaattggcccgccgccctggtgtaccaggaaattccccagcccacgaccgtactacttccgcgagacgcccaggccgaagtccagctgactaactcaggtgtccagctggcgggcggcgccaccctgtgtcgtcaccgccccgctcagggtataaagcggctggtgatccggggcagaggcacacagctcaacgacgaggtggtgagctcttcgctgggtctgcgacctgacggagtcttccaactcgccggatcggggagatcttccttcacgcctcgtcaggccgtcctgactttggagagttcgtcctcgcagccccgctcgggtggcatcggcactctccagttcgtggaggagttcactccctcggtctacttcaaccccttctccggctcccccggccactacccggacgagttcatcccgaacttcgacgccatcagcgagtcggtggacggctacgattgaatgtcccatggtggcgcagctgacctagctcggcttcgacacctggaccactgccgccgcttccgctgcttcgctcgggatctcgccgagtttgcctactttgagctgcccgaggagcaccctcagggcccggcccacggagtgcggatcgtcgtcgaagggggcctcgactcccacctgcttcggatcttcagccagcgtccgatcctggtcgagcgcgagcaaggacagacccttctgactctgtactgcatctgcaaccaccccggcctgcatgaaagtctttgttgtctgctgtgtactgagtataataaaagctgagatcagcgactactccggacttccgtgtgttcctgaatccatcaaccagtctttgttcttcaccgggaacgagaccgagctccagctccagtgtaagccccacaagaagtacctcacctggctgttccagggctccccgatcgccgttgtcaaccactgcgacaacgacggagtcctgctgagcggccctgccaaccttactttttccacccgcagaagcaagctccagctcttccaacccttcctccccgggacctatcagtgcgtctcgggaccctgccatcacaccttccacctgatcccgaataccacagcgtcgctccccgctactaacaaccaaactaacctccaccaacgccaccgtcgcgacctttctgaatctaatactaccacccacaccggaggtgagctccgaggtcaaccaacctctgggatttactacggcccctgggaggtggttgggttaatagcgctaggcctagttgcgggtgggcttttggttctctgctacctatacctcccttgctgttcgtacttagtggtgctgtgttgctggtttaagaaatggggaagatcaccctagtgagctgcggtgcgctggtggcggtgttgctttcgattgtgggactgggcggtgcggctgtagtgaaggagaaggccgatccctgcttgcatttcaatcccaacaaatgccagctgagttttcagcccgatggcaatcggtgcgcggtactgatcaagtgcggatgggaatgcgagaacgtgagaatcgagtacaataacaagactcggaacaatactctcgcgtccgtgtggcagcccggggaccccgagtggtacaccgtctctgtccccggtgctgacggctccccgcgcaccgtgaataatactttcatttttgcgcacatgtgcgacacggtcatgtggatgagcaagcagtacgatatgtggccccccacgaaggagaacatcgtggtcttctccatcgcttacagcctgtgcacggcgctaatcaccgctatcgtgtgcctgagcattcacatgctcatcgctattcgccccagaaataatgccgaaaaagaaaaacagccataacgttttttttcacacctttttcagaccatggcctctgttaaatttttgcttttatttgccagtctcattgccgtcattcatggaatgagtaatgagaaaattactatttacactggcactaatcacacattgaaaggtccagaaaaagccacagaagtttcatggtattgttattttaatgaatcagatgtatctactgaactctgtggaaacaataacaaaaaaaatgagagcattactctcatcaagtttcaatgtggatctgacttaaccctaattaacatcactagagactatgtaggtatgtattatggaactacagcaggcatttcggacatggaattttatcaagtttctgtgtctgaacccaccacgcctagaatgaccacaaccacaaaaactacacctgttaccactatgcagctcactaccaataacatttttgccatgcgtcaaatggtcaacaatagcactcaacccaccccacccagtgaggaaattcccaaatccatgattggcattattgttgctgtagtggtgtgcatgttgatcatcgccttgtgcatggtgtactatgccttctgctacagaaagcacagactgaacgacaagctggaacacttactaagtgttgaattttaattttttagaaccatgaagatcctaggccttttaattttttctatcattacctctgctctatgcaattctgacaatgaggacgttactgtcgttgtcggatcaaattatacactgaaaggtccagcgaagggtatgctttcgtggtattgctattttggatctgacactacagaaactgaattatgcaatcttaagaatggcaaaattcaaaattctaaaattaacaattatatatgcaatggtactgatctgatactcctcaatatcacgaaatcatatgctggcagttacacctgccctggagatgatgctgacagtatgattttttacaaagtaactgttgttgatcccactactccacctccacccaccacaactactcacaccacacacacagatcaaaccgcagcagaggaggcagcaaagttagccttgcaggtccaagacagttcatttgttggcattacccctacacctgatcagcggtgtccggggctgctagtcagcggcattgtcggtgtgctttcgggattagcagtcataatcatctgcatgttcatttttgcttgctgctatagaaggctttaccgacaaaaatcagacccactgctgaacctctatgtttaattttttccagagtcatgaaggcagttagcgctctagttttttgttctttgattggcattgttttttgcaatcctattcctaaagttagctttattaaagatgtgaatgttactgaggggggcaatgtgacactggtaggtgtagagggtgctgaaaacaccacctggacaaaataccacctcaatgggtggaaagatatttgcaattggagtgtattagtttatacatgtgagggagttaatcttaccattgtcaatgccacctcagctcaaaatggtagaattcaaggacaaagtgtcagtgtatctaatgggtattttacccaacatacttttatctatgacgttaaagtcataccactgcctacgcctagcccacctagcactaccacacagacaacccacactacacagacaaccacatacagtacattaaatcagcctaccaccactacagcagcagaggttgccagctcgtctggggtccgagtggcatttttgatgtgggccccatctagcagtcccactgctagtaccaatgagcagactactgaatttttgtccactgtcgagagccacaccacagctacctccagtgccttctctagcaccgccaatctctcctcgctttcctctacaccaatcagtcccgctactactcctagccccgctcctcttcccactcccctgaagcaaacagacggcggcatgcaatggcagatcaccctgctcattgtgatcgggttggtcatcctggccgtgttgctctactacatcttctgccgccgcattcccaacgcgcaccgcaagccggtctacaagcccatcattgtcgggcagccggagccgcttcaggtggaagggggtctaaggaatcttctcttctcttttacagtatggtgattgaactatgattcctagacaattcttgatcactattcttatctgcctcctccaagtctgtgccaccctcgctctggtggccaacgccagtccagactgtattgggcccttcgcctcctacgtgctctttgccttcaccacctgcatctgctgctgtagcatagtctgcctgcttatcaccttcttccagttcattgactggatctttgtgcgcatcgcctacctgcgccaccacccccagtaccgcgaccagcgagtggcgcggctgctcaggctcctctgataagcatgcgggctctgctacttctcgcgcttctgctgttagtgctcccccgtcccgtcgacccccggtcccccacccagtcccccgaggaggtccgcaaatgcaaattccaagaaccctggaaattcctcaaatgctaccgccaaaaatcagacatgcatcccagctggatcatgatcattgggatcgtgaacattctggcctgcaccctcatctcctttgtgatttacccctgctttgactttggttggaactcgccagaggcgctctatctcccgcctgaacctgacacaccaccacagcaacctcaggcacacgcactaccaccactacagcctaggccacaatacatgcccatattagactatgaggccgagccacagcgacccatgctccccgctattagttacttcaatctaaccggcggagatgactgacccactggccaacaacaacgtcaacgaccttctcctggacatggacggccgcgcctcggagcagcgactcgcccaacttcgcattcgccagcagcaggagagagccgtcaaggagctgcaggatgcggtggccatccaccagtgcaagagaggcatcttctgcctggtgaaacaggccaagatctcctacgaggtcactccaaacgaccatcgcctctcctacgagctcctgcagcagcgccagaagttcacctgcctggtcggagtcaaccccatcgtcatcacccagcagtctggcgataccaaggggtgcatccactgctcctgcgactcccccgactgcgtccacactctgatcaagaccctctgcggcctccgcgacctcctccccatgaactaatcacccccttatccagtgaaataaagatcatattgatgatgattttacagaaataaaaaataatcatttgatttgaaataaagatacaatcatattgatgatttgagtttaacaaaaaaataaagaatcacttacttgaaatctgataccaggtctctgtccatgttttctgccaacaccacttcactcccctcttcccagctctggtactgcaggccccggcgggctgcaaacttcctccacacgctgaaggggatgtcaaattcctcctgtccctcaatcttcattttatcttctatcagatgtccaaaaagcgcgtccgggtggatgatgacttcgaccccgtctacccctacgatgcagacaacgcaccgaccgtgcccttcatcaacccccccttcgtctcttcagatggattccaagagaagcccctgggggtgttgtccctgcgactggccgaccccgtcaccaccaagaacggggaaatcaccctcaagctgggagagggggtggacctcgattcctcgggaaaactcatctccaacacggccaccaaggccgccgcccctctcagtttttccaacaacaccatttcccttaacatggatcaccccttttacactaaagatggaaaattatccttacaagtttctccaccattaaatatactgagaacaagcattctaaacacactagctttaggttttggatcaggtttaggactccgtggctctgccttggcagtacagttagtctctccacttacatttgatactgatggaaacataaagcttaccttagacagaggtttgcatgttacaacaggagatgcaattgaaagcaacataagctgggctaaaggtttaaaatttgaagatggagccatagcaaccaacattggaaatgggttagagtttggaagcagtagtacagaaacaggtgttgatgatgcttacccaatccaagttaaacttggatctggccttagctttgacagtacaggagccataatggctggtaacaaagaagacgataaactcactttgtggacaacacctgatccatcaccaaactgtcaaatactcgcagaaaatgatgcaaaactaacactttgcttgactaaatgtggtagtcaaatactggccactgtgtcagtcttagttgtaggaagtggaaacctaaaccccattactggcaccgtaagcagtgctcaggtgtttctacgttttgatgcaaacggtgttcttttaacagaacattctacactaaaaaaatactgggggtataggcagggagatagcatagatggcactccatataccaatgctgtaggattcatgcccaatttaaaagcttatccaaagtcacaaagttctactactaaaaataatatagtagggcaagtatacatgaatggagatgtttcaaaacctatgcttctcactataaccctcaatggtactgatgacagcaacagtacatattcaatgtcattttcatacacctggactaatggaagctatgttggagcaacatttggggctaactcttataccttctcatacatcgcccaagaatgaacactgtatcccaccctgcatgccaacccttcccaccccactctgtggaacaaactctgaaacacaaaataaaataaagttcaagtgttttattgattcaacagttttacaggattcgagcagttatttttcctccaccctcccaggacatggaatacaccaccctctccccccgcacagccttgaacatctgaatgccattggtgatggacatgcttttggtctccacgttccacacagtttcagagcgagccagtctcgggtcggtcagggagatgaaaccctccgggcactcccgcatctgcacctcacagctcaacagctgaggattgtcctcggtggtcgggatcacggttatctggaagaagcagaagagcggcggtgggaatcatagtccgcgaacgggatcggccggtggtgtcgcatcaggccccgcagcagtcgctgccgccgccgctccgtcaagctgctgctcagggggtccgggtccagggactccctcagcatgatgcccacggccctcagcatcagtcgtctggtgcggcgggcgcagcagcgcatgcggatctcgctcaggtcgctgcagtacgtgcaacacagaaccaccaggttgttcaacagtccatagttcaacacgctccagccgaaactcatcgcgggaaggatgctacccacgtggccgtcgtaccagatcctcaggtaaatcaagtggtgccccctccagaacacgctgcccacgtacatgatctccttgggcatgtggcggttcaccacctcccggtaccacatcaccctctggttgaacatgcagccccggatgatcctgcggaaccacagggccagcaccgccccgcccgccatgcagcgaagagaccccgggtcccggcaatggcaatggaggacccaccgctcgtacccgtggatcatctgggagctgaacaagtctatgttggcacagcacaggcatatgctcatgcatctcttcagcactctcaactcctcgggggtcaaaaccatatcccagggcacggggaactcttgcaggacagcgaaccccgcagaacagggcaatcctcgcacagaacttacattgtgcatggacagggtatcgcaatcaggcagcaccgggtgatcctccaccagagaagcgcgggtctcggtctcctcacagcgtggtaagggggccggccgatacgggtgatggcgggacgcggctgatcgtgttcgcgaccgtgtcatgatgcagttgctttcggacattttcgtacttgctgtagcagaacctggtccgggcgctgcacaccgatcgccggcggcggtctcggcgcttggaacgctcggtgttgaaattgtaaaacagccactctctcagaccgtgcagcagatctagggcctcaggagtgatgaagatcccatcatgcctgatggctctgatcacatcgaccaccgtggaatgggccagacccagccagatgatgcaattttgttgggtttcggtgacggcgggggagggaagaacaggaagaaccatgattaacttttaatccaaacggtctcggagtacttcaaaatgaagatcgcggagatggcacctctcgcccccgctgtgttggtggaaaataacagccaggtcaaaggtgatacggttctcgagatgttccacggtggcttccagcaaagcctccacgcgcacatccagaaacaagacaatagcgaaagcgggagggttctctaattcctcaatcatcatgttacactcctgcaccatccccagataattttcatttttccagccttgaatgattcgaactagttcctgaggtaaatccaagccagccatgataaagagctcgcgcagagcgccctccaccggcattcttaagcacaccctcataattccaagatattctgctcctggttcacctgcagcagattgacaagcggaatatcaaaatctctgccgcgatccctgagctcctccctcagcaataactgtaagtactctttcatatcctctccgaaatttttagccataggaccaccaggaataagattagggcaagccacagtacagataaaccgaagtcctccccagtgagcattgccaaatgcaagactgctataagcatgctggctagacccggtgatatcttccagataactggacagaaaatcgcccaggcaatttttaagaaaatcaacaaaagaaaaatcctccaggtggacgtttagagcctcgggaacaacgatgaagtaaatgcaagcggtgcgttccagcatggttagttagctgatctgtagaaaaaacaaaaatgaacattaaaccatgctagcctggcgaacaggtgggtaaatcgttctctccagcaccaggcaggccacggggtctccggcgcgaccctcgtaaaaattgtcgctatgattgaaaaccatcacagagagacgttcccggtggccggcgtgaatgattcgacaagatgaatacacccccggaacattggcgtccgcgagtgaaaaaaagcgcccgaggaagcaataaggcactacaatgctcagtctcaagtccagcaaagcgatgccatgcggatgaagcacaaaattctcaggtgcgtacaaaatgtaattactcccctcctgcacaggcagcaaagcccccgatccctccaggtacacatacaaagcctcagcgtccatagcttaccgagcagcagcacacaacaggcgcaagagtcagagaaaggctgagctctaacctgtccacccgctctctgctcaatatatagcccagatctacactgacgtaaaggccaaagtctaaaaatacccgccaaataatcacacacgcccagcacacgcccagaaaccggtgacacactcaaaaaaatacgcgcacttcctcaaacgcccaaaactgccgtcatttccgggttcccacgctacgtcatcaaaacacgactttcaaattccgtcgaccgttaaaaacgtcacccgccccgcccctaacggtcgcccgtctctcagccaatcagcgccccgcatccccaaattcaaacacctcatttgcatattaacgcgcacaaaaagtttgaggtatattattgatgatgg

SEQ ID NO: 2 - DNA, 31588 bp, Artificial Sequence
  Description of Artificial Sequence: Synthetic polynucleotide
ccatcttcaataatatacctcaaactttttgtgcgcgttaatatgcaaatgaggcgtttgaatttggggaggaagggcggtgattggtcgagggatgagcgaccgttaggggcggggcgagtgacgttttgatgacgtggttgcgaggaggagccagtttgcaagttctcgtgggaaaagtgacgtcaaacgaggtgtggtttgaacacggaaatactcaattttcccgcgctctctgacaggaaatgaggtgtttctgggcggatgcaagtgaaaacgggccattttcgcgcgaaaactgaatgaggaagtgaaaatctgagtaatttcgcgtttatggcagggaggagtatttgccgagggccgagtagactttgaccgattacgtgggggtttcgattaccgtgtttttcacctaaatttccgcgtacggtgtcaaagtccggtgtttttacgtaggtgtcagctgatcgccagggtatttaaacctgcgctctccagtcaagaggccactcttgagtgccagcgagaagagttttctcctccgcgccgcgagtcagatctacactttgaaagtagggataacagggtaatgacattgattattgactagttgttaatagtaatcaattacggggtcattagttcatagcccatatatggagttccgcgttacataacttacggtaaatggcccgcctggctgaccgcccaacgacccccgcccattgacgtcaataatgacgtatgttcccatagtaacgccaatagggactttccattgacgtcaatgggtggagtatttacggtaaactgcccacttggcagtacatcaagtgtatcatatgccaagtccgccccctattgacgtcaatgacggtaaatggcccgcctggcattatgcccagtacatgaccttacgggactttcctacttggcagtacatctacgtattagtcatcgctattaccatggtgatgcggttttggcagtacaccaatgggcgtggatagcggtttgactcacggggatttccaagtctccaccccattgacgtcaatgggagtttgttttggcaccaaaatcaacgggactttccaaaatgtcgtaataaccccgccccgttgacgcaaatgggcggtaggcgtgtacggtgggaggtctatataagcagagctcgtttagtgaaccgtcagatcgcctggaacgccatccacgctgttttgacctccatagaagacagcgatcgcgccaccatggccgggatgttccaggcactgtccgaaggctgcacaccctatgatattaaccagatgctgaatgtcctgggagaccaccaggtctctggcctggagcagctggagagcatcatcaacttcgagaagctgaccgagtggacaagctccaatgtgatgcctatcctgtccccactgaccaagggcatcctgggcttcgtgtttaccctgacagtgccttctgagcggggcctgtcttgcatcagcgaggcagacgcaaccacaccagagtccgccaatctgggcgaggagatcctgtctcagctgtacctgtggccccgggtgacatatcactccccttcttacgcctatcaccagttcgagcggagagccaagtacaagagacacttcccaggctttggccagtctctgctgttcggctaccccgtgtacgtgttcggcgattgcgtgcagggcgactgggatgccatccggtttagatactgcgcaccacctggatatgcactgctgaggtgtaacgacaccaattattccgccctgctggcagtgggcgccctggagggccctcgcaatcaggattggctgggcgtgccaaggcagctggtgacacgcatgcaggccatccagaacgcaggcctgtgcaccctggtggcaatgctggaggagacaatcttctggctgcaggcctttctgatggccctgaccgacagcggccccaagacaaacatcatcgtggattcccagtacgtgatgggcatctccaagccttctttccaggagtttgtggactgggagaacgtgagcccagagctgaattccaccgatcagccattctggcaggcaggaatcctggcaaggaacctggtgcctatggtggccacagtgcagggccagaatctgaagtaccagggccagagcctggtcatcagcgcctccatcatcgtgtttaacctgctggagctggagggcgactatcgggacgatggcaacgtgtgggtgcacaccccactgagccccagaacactgaacgcctgggtgaaggccgtggaggagaagaagggcatcccagtgcacctggagctggcctccatgaccaatatggagctgatgtctagcatcgtgcaccagcaggtgaggacatacggacccgtgttcatgtgcctgggaggcctgctgaccatggtggcaggagccgtgtggctgacagtgcgggtgctggagctgttcagagccgcccagctggccaacgatgtggtgctgcagatcatggagctgtgcggagcagcctttcgccaggtgtgccacaccacagtgccatggcccaatgcctccctgacccccaagtggaacaatgagacaacacagcctcagatcgccaactgtagcgtgtacgacttcttcgtgtggctgcactactatagcgtgagggataccctgtggccccgcgtgacataccacatgaataagtacgcctatcacatgctggagaggcgcgccaagtataagagaggccctggcccaggcgcaaagtttgtggcagcatggaccctgaaggccgccgccggccccggccccggccagtatatcaaggctaacagtaagttcattggaatcacagagctgggacccggacctggataatgagtttaaactcccatttaaatgtgagggttaatgcttcgagcagacatgataagatacattgatgagtttggacaaaccacaactagaatgcagtgaaaaaaatgctttatttgtgaaatttgtgatgctattgctttatttgtaaccattataagctgcaataaacaagttaacaacaacaattgcattcattttatgtttcaggttcagggggagatgtgggaggttttttaaagcaagtaaaacctctacaaatgtggtaaaataactataacggtcctaaggtagcgagtgagtagtgttctggggcgggggaggacctgcatgagggccagaataactgaaatctgtgcttttctgtgtgttgcagcagcatgagcggaagcggctcctttgagggaggggtattcagcccttatctgacggggcgtctcccctcctgggcgggagtgcgtcagaatgtgatgggatccacggtggacggccggcccgtgcagcccgcgaactcttcaaccctgacctatgcaaccctgagctcttcgtcgttggacgcagctgccgccgcagctgctgcatctgccgccagcgccgtgcgcggaatggccatgggcgccggctactacggcactctggtggccaactcgagttccaccaataatcccgccagcctgaacgaggagaagctgttgctgctgatggcccagctcgaggccttgacccagcgcctgggcgagctgacccagcaggtggctcagctgcaggagcagacgcgggccgcggttgccacggtgaaatccaaataaaaaatgaatcaataaataaacggagacggttgttgattttaacacagagtctgaatctttatttgatttttcgcgcgcggtaggccctggaccaccggtctcgatcattgagcacccggtggatcttttccaggacccggtagaggtgggcttggatgttgaggtacatgggcatgagcccgtcccgggggtggaggtagctccattgcagggcctcgtgctcgggggtggtgttgtaaatcacccagtcatagcaggggcgcagggcatggtgttgcacaatatctttgaggaggagactgatggccacgggcagccctttggtgtaggtgtttacaaatctgttgagctgggagggatgcatgcggggggagatgaggtgcatcttggcctggatcttgagattggcgatgttaccgcccagatcccgcctggggttcatgttgtgcaggaccaccagcacggtgtatccggtgcacttggggaatttatcatgcaacttggaagggaaggcgtgaaagaatttggcgacgcctttgtgcccgcccaggttttccatgcactcatccatgatgatggcgatgggcccgtgggcggcggcctgggcaaagacgtttcgggggtcggacacatcatagttgtggtcctgggtgaggtcatcataggccattttaatgaatttggggcggagggtgccggactgggggacaaaggtaccctcgatcccgggggcgtagttcccctcacagatctgcatctcccaggctttgagctcggagggggggatcatgtccacctgcggggcgataaagaacacggtttccggggcgggggagatgagctgggccgaaagcaagttccggagcagctgggacttgccgcagccggtggggccgtagatgaccccgatgaccggctgcaggtggtagttgagggagagacagctgccgtcctcccggaggaggggggccacctcgttcatcatctcgcgcacgtgcatgttctcgcgcaccagttccgccaggaggcgctctccccccagggataggagctcctggagcgaggcgaagtttttcagcggcttgagtccgtcggccatgggcattttggagagggtttgttgcaagagttccaggcggtcccagagctcggtgatgtgctctacggcatctcgatccagcagacctcctcgtttcgcgggttgggacggctgcgggagtagggcaccagacgatgggcgtccagcgcagccagggtccggtccttccagggtcgcagcgtccgcgtcagggtggtctccgtcacggtgaaggggtgcgcgccgggctgggcgcttgcgagggtgcgcttcaggctcatccggctggtcgaaaaccgctcccgatcggcgccctgcgcgtcggccaggtagcaattgaccatgagttcgtagttgagcgcctcggccgcgtggcctttggcgcggagcttacctttggaagtctgcccgcaggcgggacagaggagggacttgagggcgtagagcttgggggcgaggaagacggactcgggggcgtaggcgtccgcgccgcagtgggcgcagacggtctcgcactccacgagccaggtgaggtcgggctggtcggggtcaaaaaccagtttcccgccgttctttttgatgcgtttcttacctttggtctccatgagctcgtgtccccgctgggtgacaaagaggctgtccgtgtccccgtagaccgactttatgggccggtcctcgagcggtgtgccgcggtcctcctcgtagaggaaccccgcccactccgagacgaaagcccgggtccaggccagcacgaaggaggccacgtgggacgggtagcggtcgttgtccaccagcgggtccaccttttccagggtatgcaaacacatgtccccctcgtccacatccaggaaggtgattggcttgtaagtgtaggccacgtgaccgggggtcccggccgggggggtataaaagggtgcgggtccctgctcgtcctcactgtcttccggatcgctgtccaggagcgccagctgttggggtaggtattccctctcgaaggcgggcatgacctcggcactcaggttgtcagtttctagaaacgaggaggatttgatattgacggtgccggcggagatgcctttcaagagcccctcgtccatctggtcagaaaagacgatctttttgttgtcgagcttggtggcgaaggagccgtagagggcgttggagaggagcttggcgatggagcgcatggtctggtttttttccttgtcggcgcgctccttggcggcgatgttgagctgcacgtactcgcgcgccacgcacttccattcggggaagacggtggtcagctcgtcgggcacgattctgacctgccagccccgattatgcagggtgatgaggtccacactggtggccacctcgccgcgcaggggctcattagtccagcagaggcgtccgcccttgcgcgagcagaaggggggcagggggtccagcatgacctcgtcgggggggtcggcatcgatggtgaagatgccgggcaggaggtcggggtcaaagtagctgatggaagtggccagatcgtccagggcagcttgccattcgcgcacggccagcgcgcgctcgtagggactgaggggcgtgccccagggcatgggatgggtaagcgcggaggcgtacatgccgcagatgtcgtagacgtagaggggctcctcgaggatgccgatgtaggtggggtagcagcgccccccgcggatgctggcgcgcacgtagtcatacagctcgtgcgagggggcgaggagccccgggcccaggttggtgcgactgggcttttcggcgcggtagacgatctggcggaaaatggcatgcgagttggaggagatggtgggcctttggaagatgttgaagtgggcgtggggcagtccgaccgagtcgcggatgaagtgggcgtaggagtcttgcagcttggcgacgagctcggcggtgactaggacgtccagagcgcagtagtcgagggtctcctggatgatgtcatacttgagctgtcccttttgtttccacagctcgcggttgagaaggaactcttcgcggtccttccagtactcttcgagggggaacccgtcctgatctgcacggtaagagcctagcatgtagaactggttgacggccttgtaggcgcagcagcccttctccacggggagggcgtaggcctgggcggccttgcgcagggaggtgtgcgtgagggcgaaagtgtccctgaccatgaccttgaggaactggtgcttgaagtcgatatcgtcgcagcccccctgctcccagagctggaagtccgtgcgcttcttgtaggcggggttgggcaaagcgaaagtaacatcgttgaagaggatcttgcccgcgcggggcataaagttgcgagtgatgcggaaaggttggggcacctcggcccggttgttgatgacctgggcggcgagcacgatctcgtcgaagccgttgatgttgtggcccacgatgtagagttccacgaatcgcggacggcccttgacgtggggcagtttcttgagctcctcgtaggtgagctcgtcggggtcgctgagcccgtgctgctcgagcgcccagtcggcgagatgggggttggcgcggaggaaggaagtccagagatccacggccagggcggtttgcagacggtcccggtactgacggaactgctgcccgacggccattttttcgggggtgacgcagtagaaggtgcgggggtccccgtgccagcgatcccatttgagctggagggcgagatcgagggcgagctcgacgagccggtcgtccccggagagtttcatgaccagcatgaaggggacgagctgcttgccgaaggaccccatccaggtgtaggtttccacatcgtaggtgaggaagagcctttcggtgcgaggatgcgagccgatggggaagaactggatctcctgccaccaattggaggaatggctgttgatgtgatggaagtagaaatgccgacggcgcgccgaacactcgtgcttgtgtttatacaagcggccacagtgctcgcaacgctgcacgggatgcacgtgctgcacgagctgtacctgagttcctttgacgaggaatttcagtgggaagtggagtcgtggcgcctgcatctcgtgctgtactacgtcgtggtggtcggcctggccctcttctgcctcgatggtggtcatgctgacgagcccgcgcgggaggcaggtccagacctcggcgcgagcgggtcggagagcgaggacgagggcgcgcaggccggagctgtccagggtcctgagacgctgcggagtcaggtcagtgggcagcggcggcgcgcggttgacttgcaggagtttttccagggcgcgcgggaggtccagatggtacttgatctccaccgcgccattggtggcgacgtcgatggcttgcagggtcccgtgcccctggggtgtgaccaccgtcccccgtttcttcttgggcggctggggcgacgggggcggtgcctcttccatggttagaagcggcggcgaggacgcgcgccgggcggcaggggcggctcggggcccggaggcaggggcggcaggggcacgtcggcgccgcgcgcgggtaggttctggtactgcgcccggagaagactggcgtgagcgacgacgcgacggttgacgtcctggatctgacgcctctgggtgaaggccacgggacccgtgagtttgaacctgaaagagagttcgacagaatcaatctcggtatcgttgacggcggcctgccgcaggatctcttgcacgtcgcccgagttgtcctggtaggcgatctcggtcatgaactgctcgatctcctcctcttgaaggtctccgcggccggcgcgctccacggtggccgcgaggtcgttggagatgcggcccatgagctgcgagaaggcgttcatgcccgcctcgttccagacgcggctgtagaccacgacgccctcgggatcgcgggcgcgcatgaccacctgggcgaggttgagctccacgtggcgcgtgaagaccgcgtagttgcagaggcgctggtagaggtagttgagcgtggtggcgatgtgctcggtgacgaagaaatacatgatccagcggcggagcggcatctcgctgacgtcgcccagcgcctccaaacgttccatggcctcgtaaaagtccacggcgaagttgaaaaactgggagttgcgcgccgagacggtcaactcctcctccagaagacggatgagctcggcgatggtggcgcgcacctcgcgctcgaaggcccccgggagttcctccacttcctcttcttcctcctccactaacatctcttctacttcctcctcaggcggcagtggtggcgggggagggggcctgcgtcgccggcggcgcacgggcagacggtcgatgaagcgctcgatggtctcgccgcgccggcgtcgcatggtctcggtgacggcgcgcccgtcctcgcggggccgcagcgtgaagacgccgccgcgcatctccaggtggccgggggggtccccgttgggcagggagagggcgctgacgatgcatcttatcaattgccccgtagggactccgcgcaaggacctgagcgtctcgagatccacgggatctgaaaaccgctgaacgaaggcttcgagccagtcgcagtcgcaaggtaggctgagcacggtttcttctggcgggtcatgttggttgggagcggggcgggcgatgctgctggtgatgaagttgaaataggcggttctgagacggcggatggtggcgaggagcaccaggtctttgggcccggcttgctggatgcgcagacggtcggccatgccccaggcgtggtcctgacacctggccaggtccttgtagtagtcctgcatgagccgctccacgggcacctcctcctcgcccgcgcggccgtgcatgcgcgtgagcccgaagccgcgctggggctggacgagcgccaggtcggcgacgacgcgctcggcgaggatggcttgctggatctgggtgagggtggtctggaagtcatcaaagtcgacgaagcggtggtaggctccggtgttgatggtgtaggagcagttggccatgacggaccagttgacggtctggtggcccggacgcacgagctcgtggtacttgaggcgcgagtaggcgcgcgtgtcgaagatgtagtcgttgcaggtgcgcaccaggtactggtagccgatgaggaagtgcggcggcggctggcggtagagcggccatcgctcggtggcgggggcgccgggcgcgaggtcctcgagcatggtgcggtggtagccgtagatgtacctggacatccaggtgatgccggcggcggtggtggaggcgcgcgggaactcgcggacgcggttccagatgttgcgcagcggcaggaagtagttcatggtgggcacggtctggcccgtgaggcgcgcgcagtcgtggatgctctatacgggcaaaaacgaaagcggtcagcggctcgactccgtggcctggaggctaagcgaacgggttgggctgcgcgtgtaccccggttcgaatctcgaatcaggctggagccgcagctaacgtggtattggcactcccgtctcgacccaagcctgcaccaaccctccaggatacggaggcgggtcgttttgcaacttttttttggaggccggatgagactagtaagcgcggaaagcggccgaccgcgatggctcgctgccgtagtctggagaagaatcgccagggttgcgttgcggtgtgccccggttcgaggccggccggattccgcggctaacgagggcgtggctgccccgtcgtttccaagaccccatagccagccgacttctccagttacggagcgagcccctcttttgttttgtttgtttttgccagatgcatcccgtactgcggcagatgcgcccccaccaccctccaccgcaacaacagccccctccacagccggcgcttctgcccccgccccagcagcaacttccagccacgaccgccgcggccgccgtgagcggggctggacagagttatgatcaccagctggccttggaagagggcgaggggctggcgcgcctgggggcgtcgtcgccggagcggcacccgcgcgtgcagatgaaaagggacgctcgcgaggcctacgtgcccaagcagaacctgttcagagacaggagcggcgaggagcccgaggagatgcgcgcggcccggttccacgcggggcgggagctgcggcgcggcctggaccgaaagagggtgctgagggacgaggatttcgaggcggacgagctgacggggatcagccccgcgcgcgcgcacgtggccgcggccaacctggtcacggcgtacgagcagaccgtgaaggaggagagcaacttccaaaaatccttcaacaaccacgtgcgcaccctgatcgcgcgcgaggaggtgaccctgggcctgatgcacctgtgggacctgctggaggccatcgtgcagaaccccaccagcaagccgctgacggcgcagctgttcctggtggtgcagcatagtcgggacaacgaagcgttcagggaggcgctgctgaatatcaccgagcccgagggccgctggctcctggacctggtgaacattctgcagagcatcgtggtgcaggagcgcgggctgccgctgtccgagaagctggcggccatcaacttctcggtgctgagtttgggcaagtactacgctaggaagatctacaagaccccgtacgtgcccatagacaaggaggtgaagatcgacgggttttacatgcgcatgaccctgaaagtgctgaccctgagcgacgatctgggggtgtaccgcaacgacaggatgcaccgtgcggtgagcgccagcaggcggcgcgagctgagcgaccaggagctgatgcatagtctgcagcgggccctgaccggggccgggaccgagggggagagctactttgacatgggcgcggacctgcactggcagcccagccgccgggccttggaggcggcggcaggaccctacgtagaagaggtggacgatgaggtggacgaggagggcgagtacctggaagactgatggcgcgaccgtatttttgctagatgcaacaacaacagccacctcctgatcccgcgatgcgggcggcgctgcagagccagccgtccggcattaactcctcggacgattggacccaggccatgcaacgcatcatggcgctgacgacccgcaaccccgaagcctttagacagcagccccaggccaaccggctctcggccatcctggaggccgtggtgccctcgcgctccaaccccacgcacgagaaggtcctggccatcgtgaacgcgctggtggagaacaaggccatccgcggcgacgaggccggcctggtgtacaacgcgctgctggagcgcgtggcccgctacaacagcaccaacgtgcagaccaacctggaccgcatggtgaccgacgtgcgcgaggccgtggcccagcgcgagcggttccaccgcgagtccaacctgggatccatggtggcgctgaacgccttcctcagcacccagcccgccaacgtgccccggggccaggaggactacaccaacttcatcagcgccctgcgcctgatggtgaccgaggtgccccagagcgaggtgtaccagtccgggccggactacttcttccagaccagtcgccagggcttgcagaccgtgaacctgagccaggctttcaagaacttgcagggcctgtggggcgtgcaggccccggtcggggaccgcgcgacggtgtcgagcctgctgacgccgaactcgcgcctgctgctgctgctggtggcccccttcacggacagcggcagcatcaaccgcaactcgtacctgggctacctgattaacctgtaccgcgaggccatcggccaggcgcacgtggacgagcagacctaccaggagatcacccacgtgagccgcgccctgggccaggacgacccgggcaacctggaagccaccctgaactttttgctgaccaaccggtcgcagaagatcccgccccagtacgcgctcagcaccgaggaggagcgcatcctgcgttacgtgcagcagagcgtgggcctgttcctgatgcaggagggggccacccccagcgccgcgctcgacatgaccgcgcgcaacatggagcccagcatgtacgccagcaaccgcccgttcatcaataaactgatggactacttgcatcgggcggccgccatgaactctgactatttcaccaacgccatcctgaatccccactggctcccgccgccggggttctacacgggcgagtacgacatgcccgaccccaatgacgggttcctgtgggacgatgtggacagcagcgtgttctccccccgaccgggtgctaacgagcgccccttgtggaagaaggaaggcagcgaccgacgcccgtcctcggcgctgtccggccgcgagggtgctgccgcggcggtgcccgaggccgccagtcctttcccgagcttgcccttctcgctgaacagtatccgcagcagcgagctgggcaggatcacgcgcccgcgcttgctgggcgaagaggagtacttgaatgactcgctgttgagacccgagcgggagaagaacttccccaataacgggatagaaagcctggtggacaagatgagccgctggaagacgtatgcgcaggagcacagggacgatccccgggcgtcgcagggggccacgagccggggcagcgccgcccgtaaacgccggtggcacgacaggcagcggggacagatgtgggacgatgaggactccgccgacgacagcagcgtgttggacttgggtgggagtggtaacccgttcgctcacctgcgcccccgtatcgggcgcatgatgtaagagaaaccgaaaataaatgatactcaccaaggccatggcgaccagcgtgcgttcgtttcttctctgttgttgttgtatctagtatgatgaggcgtgcgtacccggagggtcctcctccctcgtacgagagcgtgatgcagcaggcgatggcggcggcggcgatgcagcccccgctggaggctccttacgtgcccccgcggtacctggcgcctacggaggggcggaacagcattcgttactcggagctggcacccttgtacgataccacccggttgtacctggtggacaacaagtcggcggacatcgcctcgctgaactaccagaacgaccacagcaacttcctgaccaccgtggtgcagaacaatgacttcacccccacggaggccagcacccagaccatcaactttgacgagcgctcgcggtggggcggccagctgaaaaccatcatgcacaccaacatgcccaacgtgaacgagttcatgtacagcaacaagttcaaggcgcgggtgatggtctcccgcaagacccccaatggggtgacagtgacagaggattatgatggtagtcaggatgagctgaagtatgaatgggtggaatttgagctgcccgaaggcaacttctcggtgaccatgaccatcgacctgatgaacaacgccatcatcgacaattacttggcggtggggcggcagaacggggtgctggagagcgacatcggcgtgaagttcgacactaggaacttcaggctgggctgggaccccgtgaccgagctggtcatgcccggggtgtacaccaacgaggctttccatcccgatattgtcttgctgcccggctgcggggtggacttcaccgagagccgcctcagcaacctgctgggcattcgcaagaggcagcccttccaggaaggcttccagatcatgtacgaggatctggaggggggcaacatccccgcgctcctggatgtcgacgcctatgagaaaagcaaggaggatgcagcagctgaagcaactgcagccgtagctaccgcctctaccgaggtcaggggcgataattttgcaagcgccgcagcagtggcagcggccgaggcggctgaaaccgaaagtaagatagtcattcagccggtggagaaggatagcaagaacaggagctacaacgtactaccggacaagataaacaccgcctaccgcagctggtacctagcctacaactatggcgaccccgagaagggcgtgcgctcctggacgctgctcaccacctcggacgtcacctgcggcgtggagcaagtctactggtcgctgcccgacatgatgcaagacccggtcaccttccgctccacgcgtcaagttagcaactacccggtggtgggcgccgagctcctgcccgtctactccaagagcttcttcaacgagcaggccgtctactcgcagcagctgcgcgccttcacctcgcttacgcacgtcttcaaccgcttccccgagaaccagatcctcgtccgcccgcccgcgcccaccattaccaccgtcagtgaaaacgttcctgctctcacagatcacgggaccctgccgctgcgcagcagtatccggggagtccagcgcgtgaccgttactgacgccagacgccgcacctgcccctacgtctacaaggccctgggcatagtcgcgccgcgcgtcctctcgagccgcaccttctaaatgtccattctcatctcgcccagtaataacaccggttggggcctgcgcgcgcccagcaagatgtacggaggcgctcgccaacgctccacgcaacaccccgtgcgcgtgcgcgggcacttccgcgctccctggggcgccctcaagggccgcgtgcggtcgcgcaccaccgtcgacgacgtgatcgaccaggtggtggccgacgcgcgcaactacacccccgccgccgcgcccgtctccaccgtggacgccgtcatcgacagcgtggtggccgacgcgcgccggtacgcccgcgccaagagccggcggcggcgcatcgcccggcggcaccggagcacccccgccatgcgcgcggcgcgagccttgctgcgcagggccaggcgcacgggacgcagggccatgctcagggcggccagacgcgcggcttcaggcgccagcgccggcaggacccggagacgcgcggccacggcggcggcagcggccatcgccagcatgtcccgcccgcggcgagggaacgtgtactgggtgcgcgacgccgccaccggtgtgcgcgtgcccgtgcgcacccgcccccctcgcacttgaagatgttcacttcgcgatgttgatgtgtcccagcggcgaggaggatgtccaagcgcaaattcaaggaagagatgctccaggtcatcgcgcctgagatctacggccctgcggtggtgaaggaggaaagaaagccccgcaaaatcaagcgggtcaaaaaggacaaaaaggaagaagaaagtgatgtggacggattggtggagtttgtgcgcgagttcgccccccggcggcgcgtgcagtggcgcgggcggaaggtgcaaccggtgctgagacccggcaccaccgtggtcttcacgcccggcgagcgctccggcaccgcttccaagcgctcctacgacgaggtgtacggggatgatgatattctggagcaggcggccgagcgcctgggcgagtttgcttacggcaagcgcagccgttccgcaccgaaggaagaggcggtgtccatcccgctggaccacggcaaccccacgccgagcctcaagcccgtgaccttgcagcaggtgctgccgaccgcggcgccgcgccgggggttcaagcgcgagggcgaggatctgtaccccaccatgcagctgatggtgcccaagcgccagaagctggaagacgtgctggagaccatgaaggtggacccggacgtgcagcccgaggtcaaggtgcggcccatcaagcaggtggccccgggcctgggcgtgcagaccgtggacatcaagattcccacggagcccatggaaacgcagaccgagcccatgatcaagcccagcaccagcaccatggaggtgcagacggatccctggatgccatcggctcctagtcgaagaccccggcgcaagtacggcgcggccagcctgctgatgcccaactacgcgctgcatccttccatcatccccacgccgggctaccgcggcacgcgcttctaccgcggtcataccagcagccgccgccgcaagaccaccactcgccgccgccgtcgccgcaccgccgctgcaaccacccctgccgccctggtgcggagagtgtaccgccgcggccgcgcacctctgaccctgccgcgcgcgcgctaccacccgagcatcgccatttaaactttcgcctgctttgcagatcaatggccctcacatgccgccttcgcgttcccattacgggctaccgaggaagaaaaccgcgccgtagaaggctggcggggaacgggatgcgtcgccaccaccaccggcggcggcgcgccatcagcaagcggttggggggaggcttcctgcccgcgctgatccccatcatcgccgcggcgatcggggcgatccccggcattgcttccgtggcggtgcaggcctctcagcgccactgagacacacttggaaacatcttgtaataaaccaatggactctgacgctcctggtcctgtgatgtgttttcgtagacagatggaagacatcaatttttcgtccctggctccgcgacacggcacgcggccgttcatgggcacctggagcgacatcggcaccagccaactgaacgggggcgccttcaattggagcagtctctggagcgggcttaagaatttcgggtccacgcttaaaacctatggcagcaaggcgtggaacagcaccacagggcaggcgctgagggataagctgaaagagcagaacttccagcagaaggtggtcgatgggctcgcctcgggcatcaacggggtggtggacctggccaaccaggccgtgcagcggcagatcaacagccgcctggacccggtgccgcccgccggctccgtggagatgccgcaggtggaggaggagctgcctcccctggacaagcggggcgagaagcgaccccgccccgatgcggaggagacgctgctgacgcacacggacgagccgcccccgtacgaggaggcggtgaaactgggtctgcccaccacgcggcccatcgcgcccctggccaccggggtgctgaaacccgaaaagcccgcgaccctggacttgcctcctccccagccttcccgcccctctacagtggctaagcccctgccgccggtggccgtggcccgcgcgcgacccgggggcaccgcccgccctcatgcgaactggcagagcactctgaacagcatcgtgggtctgggagtgcagagtgtgaagcgccgccgctgctattaaacctaccgtagcgcttaacttgcttgtctgtgtgtgtatgtattatgtcgccgccgccgctgtccaccagaaggaggagtgaagaggcgcgtcgccgagttgcaagatggccaccccatcgatgctgccccagtgggcgtacatgcacatcgccggacaggacgcttcggagtacctgagtccgggtctggtgcagtttgcccgcgccacagacacctacttcagtctggggaacaagtttaggaaccccacggtggcgcccacgcacgatgtgaccaccgaccgcagccagcggctgacgctgcgcttcgtgcccgtggaccgcgaggacaacacctactcgtacaaagtgcgctacacgctggccgtgggcgacaaccgcgtgctggacatggccagcacctactttgacatccgcggcgtgctggatcggggccctagcttcaaaccctactccggcaccgcctacaacagtctggcccccaagggagcacccaacacttgtcagtggacatataaagccgatggtgaaactgccacagaaaaaacctatacatatggaaatgcacccgtgcagggcattaacatcacaaaagatggtattcaacttggaactgacaccgatgatcagccaatctacgcagataaaacctatcagcctgaacctcaagtgggtgatgctgaatggcatgacatcactggtactgatgaaaagtatggaggcagagctcttaagcctgataccaaaatgaagccttgttatggttcttttgccaagcctactaataaagaaggaggtcaggcaaatgtgaaaacaggaacaggcactactaaagaatatgacatagacatggctttctttgacaacagaagtgcggctgctgctggcctagctccagaaattgttttgtatactgaaaatgtggatttggaaactccagatacccatattgtatacaaagcaggcacagatgacagcagctcttctattaatttgggtcagcaagccatgcccaacagacctaactacattggtttcagagacaactttatcgggctcatgtactacaacagcactggcaatatgggggtgctggccggtcaggcttctcagctgaatgctgtggttgacttgcaagacagaaacaccgagctgtcctaccagctcttgcttgactctctgggtgacagaacccggtatttcagtatgtggaatcaggcggtggacagctatgatcctgatgtgcgcattattgaaaatcatggtgtggaggatgaacttcccaactattgtttccctctggatgctgttggcagaacagatacttatcagggaattaaggctaatggaactgatcaaaccacatggaccaaagatgacagtgtcaatgatgctaatgagataggcaagggtaatccattcgccatggaaatcaacatccaagccaacctgtggaggaacttcctctacgccaacgtggccctgtacctgcccgactcttacaagtacacgccggccaatgttaccctgcccaccaacaccaacacctacgattacatgaacggccgggtggtggcgccctcgctggtggactcctacatcaacatcggggcgcgctggtcgctggatcccatggacaacgtgaaccccttcaaccaccaccgcaatgcggggctgcgctaccgctccatgctcctgggcaacgggcgctacgtgcccttccacatccaggtgccccagaaatttttcgccatcaagagcctcctgctcctgcccgggtcctacacctacgagtggaacttccgcaaggacgtcaacatgatcctgcagagctccctcggcaacgacctgcgcacggacggggcctccatctccttcaccagcatcaacctctacgccaccttcttccccatggcgcacaacacggcctccacgctcgaggccatgctgcgcaacgacaccaacgaccagtccttcaacgactacctctcggcggccaacatgctctaccccatcccggccaacgccaccaacgtgcccatctccatcccctcgcgcaactgggccgccttccgcggctggtccttcacgcgtctcaagaccaaggagacgccctcgctgggctccgggttcgacccctacttcgtctactcgggctccatcccctacctcgacggcaccttctacctcaaccacaccttcaagaaggtctccatcaccttcgactcctccgtcagctggcccggcaacgaccggctcctgacgcccaacgagttcgaaatcaagcgcaccgtcgacggcgagggctacaacgtggcccagtgcaacatgaccaaggactggttcctggtccagatgctggcccactacaacatcggctaccagggcttctacgtgcccgagggctacaaggaccgcatgtactccttcttccgcaacttccagcccatgagccgccaggtggtggacgaggtcaactacaaggactaccaggccgtcaccctggcctaccagcacaacaactcgggcttcgtcggctacctcgcgcccaccatgcgccagggccagccctaccccgccaactacccctacccgctcatcggcaagagcgccgtcaccagcgtcacccagaaaaagttcctctgcgacagggtcatgtggcgcatccccttctccagcaacttcatgtccatgggcgcgctcaccgacctcggccagaacatgctctatgccaactccgcccacgcgctagacatgaatttcgaagtcgaccccatggatgagtccacccttctctatgttgtcttcgaagtcttcgacgtcgtccgagtgcaccagccccaccgcggcgtcatcgaggccgtctacctgcgcacccccttctcggccggtaacgccaccacctaagctcttgcttcttgcaagccatggccgcgggctccggcgagcaggagctcagggccatcatccgcgacctgggctgcgggccctacttcctgggcaccttcgataagcgcttcccgggattcatggccccgcacaagctggcctgcgccatcgtcaacacggccggccgcgagaccgggggcgagcactggctggccttcgcctggaacccgcgctcgaacacctgctacctcttcgaccccttcgggttctcggacgagcgcctcaagcagatctaccagttcgagtacgagggcctgctgcgccgcagcgccctggccaccgaggaccgctgcgtcaccctggaaaagtccacccagaccgtgcagggtccgcgctcggccgcctgcgggctcttctgctgcatgttcctgcacgccttcgtgcactggcccgaccgccccatggacaagaaccccaccatgaacttgctgacgggggtgcccaacggcatgctccagtcgccccaggtggaacccaccctgcgccgcaaccaggaggcgctctaccgcttcctcaactcccactccgcctactttcgctcccaccgcgcgcgcatcgagaaggccaccgccttcgaccgcatgaatcaagacatgtaaaccgtgtgtgtatgttaaatgtctttaataaacagcactttcatgttacacatgcatctgagatgatttatttagaaatcgaaagggttctgccgggtctcggcatggcccgcgggcagggacacgttgcggaactggtacttggccagccacttgaactcggggatcagcagtttgggcagcggggtgtcggggaaggagtcggtccacagcttccgcgtcagttgcagggcgcccagcaggtcgggcgcggagatcttgaaatcgcagttgggacccgcgttctgcgcgcgggagttgcggtacacggggttgcagcactggaacaccatcagggccgggtgcttcacgctcgccagcaccgtcgcgtcggtgatgctctccacgtcgaggtcctcggcgttggccatcccgaagggggtcatcttgcaggtctgccttcccatggtgggcacgcacccgggcttgtggttgcaatcgcagtgcagggggatcagcatcatctgggcctggtcggcgttcatccccgggtacatggccttcatgaaagcctccaattgcctgaacgcctgctgggccttggctccctcggtgaagaagaccccgcaggacttgctagagaactggttggtggcgcacccggcgtcgtgcacgcagcagcgcgcgtcgttgttggccagctgcaccacgctgcgcccccagcggttctgggtgatcttggcccggtcggggttctccttcagcgcgcgctgcccgttctcgctcgccacatccatctcgatcatgtgctccttctggatcatggtggtcccgtgcaggcaccgcagcttgccctcggcctcggtgcacccgtgcagccacagcgcgcacccggtgcactcccagttcttgtgggcgatctgggaatgcgcgtgcacgaagccctgcaggaagcggcccatcatggtggtcagggtcttgttgctagtgaaggtcagcggaatgccgcggtgctcctcgttgatgtacaggtggcagatgcggcggtacacctcgccctgctcgggcatcagctggaagttggctttcaggtcggtctccacgcggtagcggtccatcagcatagtcatgatttccatacccttctcccaggccgagacgatgggcaggctcatagggttcttcaccatcatcttagcgctagcagccgcggccagggggtcgctctcgtccagggtctcaaagctccgcttgccgtccttctcggtgatccgcaccggggggtagctgaagcccacggccgccagctcctcctcggcctgtctttcgtcctcgctgtcctggctgacgtcctgcaggaccacatgcttggtcttgcggggtttcttcttgggcggcagcggcggcggagatgttggagatggcgagggggagcgcgagttctcgctcaccactactatctcttcctcttcttggtccgaggccacgcggcggtaggtatgtctcttcgggggcagaggcggaggcgacgggctctcgccgccgcgacttggcggatggctggcagagccccttccgcgttcgggggtgcgctcccggcggcgctctgactgacttcctccgcggccggccattgtgttctcctagggaggaacaacaagcatggagactcagccatcgccaacctcgccatctgcccccaccgccgacgagaagcagcagcagcagaatgaaagcttaaccgccccgccgcccagccccgccacctccgacgcggccgtcccagacatgcaagagatggaggaatccatcgagattgacctgggctatgtgacgcccgcggagcacgaggaggagctggcagtgcgcttttcacaagaagagatacaccaagaacagccagagcaggaagcagagaatgagcagagtcaggctgggctcgagcatgacggcgactacctccacctgagcgggggggaggacgcgctcatcaagcatctggcccggcaggccaccatcgtcaaggatgcgctgctcgaccgcaccgaggtgcccctcagcgtggaggagctcagccgcgcctacgagttgaacctcttctcgccgcgcgtgccccccaagcgccagcccaatggcacctgcgagcccaacccgcgcctcaacttctacccggtcttcgcggtgcccgaggccctggccacctaccacatctttttcaagaaccaaaagatccccgtctcctgccgcgccaaccgcacccgcgccgacgcccttttcaacctgggtcccggcgcccgcctacctgatatcgcctccttggaagaggttcccaagatcttcgagggtctgggcagcgacgagactcgggccgcgaacgctctgcaaggagaaggaggagagcatgagcaccacagcgccctggtcgagttggaaggcgacaacgcgcggctggcggtgctcaaacgcacggtcgagctgacccatttcgcctacccggctctgaacctgccccccaaagtcatgagcgcggtcatggaccaggtgctcatcaagcgcgcgtcgcccatctccgaggacgagggcatgcaagactccgaggagggcaagcccgtggtcagcgacgagcagctggcccggtggctgggtcctaatgctagtccccagagtttggaagagcggcgcaaactcatgatggccgtggtcctggtgaccgtggagctggagtgcctgcgccgcttcttcgccgacgcggagaccctgcgcaaggtcgaggagaacctgcactacctcttcaggcacgggttcgtgcgccaggcctgcaagatctccaacgtggagctgaccaacctggtctcctacatgggcatcttgcacgagaaccgcctggggcagaacgtgctgcacaccaccctgcgcggggaggcccggcgcgactacatccgcgactgcgtctacctctacctctgccacacctggcagacgggcatgggcgtgtggcagcagtgtctggaggagcagaacctgaaagagctctgcaagctcctgcagaagaacctcaagggtctgtggaccgggttcgacgagcgcaccaccgcctcggacctggccgacctcattttccccgagcgcctcaggctgacgctgcgcaacggcctgcccgactttatgagccaaagcatgttgcaaaactttcgctctttcatcctcgaacgctccggaatcctgcccgccacctgctccgcgctgccctcggacttcgtgccgctgaccttccgcgagtgccccccgccgctgtggagccactgctacctgctgcgcctggccaactacctggcctaccactcggacgtgatcgaggacgtcagcggcgagggcctgctcgagtgccactgccgctgcaacctctgcacgccgcaccgctccctggcctgcaacccccagctgctgagcgagacccagatcatcggcaccttcgagttgcaagggcccagcgaaggcgagggttcagccgccaaggggggtctgaaactcaccccggggctgtggacctcggcctacttgcgcaagttcgtgcccgaggactaccatcccttcgagatcaggttctacgaggaccaatcccatccgcccaaggccgagctgtcggcctgcgtcatcacccagggggcgatcctggcccaattgcaagccatccagaaatcccgccaagaattcttgctgaaaaagggccgcggggtctacctcgacccccagaccggtgaggagctcaaccccggcttcccccaggatgccccgaggaaacaagaagctgaaagtggagctgccgcccgtggaggatttggaggaagactgggagaacagcagtcaggcagaggaggaggagatggaggaagactgggacagcactcaggcagaggaggacagcctgcaagacagtctggaggaagacgaggaggaggcagaggaggaggtggaagaagcagccgccgccagaccgtcgtcctcggcgggggagaaagcaagcagcacggataccatctccgctccgggtcggggtcccgctcgaccacacagtagatgggacgagaccggacgattcccgaaccccaccacccagaccggtaagaaggagcggcagggatacaagtcctggcgggggcacaaaaacgccatcgtctcctgcttgcaggcctgcgggggcaacatctccttcacccggcgctacctgctcttccaccgcggggtgaactttccccgcaacatcttgcattactaccgtcacctccacagcccctactacttccaagaagaggcagcagcagcagaaaaagaccagcagaaaaccagcagctagaaaatccacagcggcggcagcaggtggactgaggatcgcggcgaacgagccggcgcaaacccgggagctgaggaaccggatctttcccaccctctatgccatcttccagcagagtcgggggcaggagcaggaactgaaagtcaagaaccgttctctgcgctcgctcacccgcagttgtctgtatcacaagagcgaagaccaacttcagcgcactctcgaggacgccgaggctctcttcaacaagtactgcgcgctcactcttaaagagtagcccgcgcccgcccagtcgcagaaaaaggcgggaattacgtcacctgtgcccttcgccctagccgcctccacccatcatcatgagcaaagagattcccacgccttacatgtggagctaccagccccagatgggcctggccgccggtgccgcccaggactactccacccgcatgaattggctcagcgccgggcccgcgatgatctcacgggtgaatgacatccgcgcccaccgaaaccagatactcctagaacagtcagcgctcaccgccacgccccgcaatcacctcaatccgcgtaattggcccgccgccctggtgtaccaggaaattccccagcccacgaccgtactacttccgcgagacgcccaggccgaagtccagctgactaactcaggtgtccagctggcgggcggcgccaccctgtgtcgtcaccgccccgctcagggtataaagcggctggtgatccggggcagaggcacacagctcaacgacgaggtggtgagctcttcgctgggtctgcgacctgacggagtcttccaactcgccggatcggggagatcttccttcacgcctcgtcaggccgtcctgactttggagagttcgtcctcgcagccccgctcgggtggcatcggcactctccagttcgtggaggagttcactccctcggtctacttcaaccccttctccggctcccccggccactacccggacgagttcatcccgaacttcgacgccatcagcgagtcggtggacggctacgattgaaactaatcacccccttatccagtgaaataaagatcatattgatgatgattttacagaaataaaaaataatcatttgatttgaaataaagatacaatcatattgatgatttgagtttaacaaaaaaataaagaatcacttacttgaaatctgataccaggtctctgtccatgttttctgccaacaccacttcactcccctcttcccagctctggtactgcaggccccggcgggctgcaaacttcctccacacgctgaaggggatgtcaaattcctcctgtccctcaatcttcattttatcttctatcagatgtccaaaaagcgcgtccgggtggatgatgacttcgaccccgtctacccctacgatgcagacaacgcaccgaccgtgcccttcatcaacccccccttcgtctcttcagatggattccaagagaagcccctgggggtgttgtccctgcgactggccgaccccgtcaccaccaagaacggggaaatcaccctcaagctgggagagggggtggacctcgattcctcgggaaaactcatctccaacacggccaccaaggccgccgcccctctcagtttttccaacaacaccatttcccttaacatggatcaccccttttacactaaagatggaaaattatccttacaagtttctccaccattaaatatactgagaacaagcattctaaacacactagctttaggttttggatcaggtttaggactccgtggctctgccttggcagtacagttagtctctccacttacatttgatactgatggaaacataaagcttaccttagacagaggtttgcatgttacaacaggagatgcaattgaaagcaacataagctgggctaaaggtttaaaatttgaagatggagccatagcaaccaacattggaaatgggttagagtttggaagcagtagtacagaaacaggtgttgatgatgcttacccaatccaagttaaacttggatctggccttagctttgacagtacaggagccataatggctggtaacaaagaagacgataaactcactttgtggacaacacctgatccatcaccaaactgtcaaatactcgcagaaaatgatgcaaaactaacactttgcttgactaaatgtggtagtcaaatactggccactgtgtcagtcttagttgtaggaagtggaaacctaaaccccattactggcaccgtaagcagtgctcaggtgtttctacgttttgatgcaaacggtgttcttttaacagaacattctacactaaaaaaatactgggggtataggcagggagatagcatagatggcactccatataccaatgctgtaggattcatgcccaatttaaaagcttatccaaagtcacaaagttctactactaaaaataatatagtagggcaagtatacatgaatggagatgtttcaaaacctatgcttctcactataaccctcaatggtactgatgacagcaacagtacatattcaatgtcattttcatacacctggactaatggaagctatgttggagcaacatttggggctaactcttataccttctcatacatcgcccaagaatgaacactgtatcccaccctgcatgccaacccttcccaccccactctgtggaacaaactctgaaacacaaaataaaataaagttcaagtgttttattgattcaacagttttacaggattcgagcagttatttttcctccaccctcccaggacatggaatacaccaccctctccccccgcacagccttgaacatctgaatgccattggtgatggacatgcttttggtctccacgttccacacagtttcagagcgagccagtctcgggtcggtcagggagatgaaaccctccgggcactcccgcatctgcacctcacagctcaacagctgaggattgtcctcggtggtcgggatcacggttatctggaagaagcagaagagcggcggtgggaatcatagtccgcgaacgggatcggccggtggtgtcgcatcaggccccgcagcagtcgctgccgccgccgctccgtcaagctgctgctcagggggtccgggtccagggactccctcagcatgatgcccacggccctcagcatcagtcgtctggtgcggcgggcgcagcagcgcatgcggatctcgctcaggtcgctgcagtacgtgcaacacagaaccaccaggttgttcaacagtccatagttcaacacgctccagccgaaactcatcgcgggaaggatgctacccacgtggccgtcgtaccagatcctcaggtaaatcaagtggtgccccctccagaacacgctgcccacgtacatgatctccttgggcatgtggcggttcaccacctcccggtaccacatcaccctctggttgaacatgcagccccggatgatcctgcggaaccacagggccagcaccgccccgcccgccatgcagcgaagagaccccgggtcccggcaatggcaatggaggacccaccgctcgtacccgtggatcatctgggagctgaacaagtctatgttggcacagcacaggcatatgctcatgcatctcttcagcactctcaactcctcgggggtcaaaaccatatcccagggcacggggaactcttgcaggacagcgaaccccgcagaacagggcaatcctcgcacagaacttacattgtgcatggacagggtatcgcaatcaggcagcaccgggtgatcctccaccagagaagcgcgggtctcggtctcctcacagcgtggtaagggggccggccgatacgggtgatggcgggacgcggctgatcgtgttcgcgaccgtgtcatgatgcagttgctttcggacattttcgtacttgctgtagcagaacctggtccgggcgctgcacaccgatcgccggcggcggtctcggcgcttggaacgctcggtgttgaaattgtaaaacagccactctctcagaccgtgcagcagatctagggcctcaggagtgatgaagatcccatcatgcctgatggctctgatcacatcgaccaccgtggaatgggccagacccagccagatgatgcaattttgttgggtttcggtgacggcgggggagggaagaacaggaagaaccatgattaacttttaatccaaacggtctcggagtacttcaaaatgaagatcgcggagatggcacctctcgcccccgctgtgttggtggaaaataacagccaggtcaaaggtgatacggttctcgagatgttccacggtggcttccagcaaagcctccacgcgcacatccagaaacaagacaatagcgaaagcgggagggttctctaattcctcaatcatcatgttacactcctgcaccatccccagataattttcatttttccagccttgaatgattcgaactagttcctgaggtaaatccaagccagccatgataaagagctcgcgcagagcgccctccaccggcattcttaagcacaccctcataattccaagatattctgctcctggttcacctgcagcagattgacaagcggaatatcaaaatctctgccgcgatccctgagctcctccctcagcaataactgtaagtactctttcatatcctctccgaaatttttagccataggaccaccaggaataagattagggcaagccacagtacagataaaccgaagtcctccccagtgagcattgccaaatgcaagactgctataagcatgctggctagacccggtgatatcttccagataactggacagaaaatcgcccaggcaatttttaagaaaatcaacaaaagaaaaatcctccaggtggacgtttagagcctcgggaacaacgatgaagtaaatgcaagcggtgcgttccagcatggttagttagctgatctgtagaaaaaacaaaaatgaacattaaaccatgctagcctggcgaacaggtgggtaaatcgttctctccagcaccaggcaggccacggggtctccggcgcgaccctcgtaaaaattgtcgctatgattgaaaaccatcacagagagacgttcccggtggccggcgtgaatgattcgacaagatgaatacacccccggaacattggcgtccgcgagtgaaaaaaagcgcccgaggaagcaataaggcactacaatgctcagtctcaagtccagcaaagcgatgccatgcggatgaagcacaaaattctcaggtgcgtacaaaatgtaattactcccctcctgcacaggcagcaaagcccccgatccctccaggtacacatacaaagcctcagcgtccatagcttaccgagcagcagcacacaacaggcgcaagagtcagagaaaggctgagctctaacctgtccacccgctctctgctcaatatatagcccagatctacactgacgtaaaggccaaagtctaaaaatacccgccaaataatcacacacgcccagcacacgcccagaaaccggtgacacactcaaaaaaatacgcgcacttcctcaaacgcccaaaactgccgtcatttccgggttcccacgctacgtcatcaaaacacgactttcaaattccgtcgaccgttaaaaacgtcacccgccccgcccctaacggtcgcccgtctctcagccaatcagcgccccgcatccccaaattcaaacacctcatttgcatattaacgcgcacaaaaagtttgagg

SEQ ID NO: 3 - DNA, 11447 bp, Venezuelan equine encephalitis virus
atgggcggcgcatgagagaagcccagaccaattacctacccaaaatggagaaagttcacgttgacatcgaggaagacagcccattcctcagagctttgcagcggagcttcccgcagtttgaggtagaagccaagcaggtcactgataatgaccatgctaatgccagagcgttttcgcatctggcttcaaaactgatcgaaacggaggtggacccatccgacacgatccttgacattggaagtgcgcccgcccgcagaatgtattctaagcacaagtatcattgtatctgtccgatgagatgtgcggaagatccggacagattgtataagtatgcaactaagctgaagaaaaactgtaaggaaataactgataaggaattggacaagaaaatgaaggagctcgccgccgtcatgagcgaccctgacctggaaactgagactatgtgcctccacgacgacgagtcgtgtcgctacgaagggcaagtcgctgtttaccaggatgtatacgcggttgacggaccgacaagtctctatcaccaagccaataagggagttagagtcgcctactggataggctttgacaccaccccttttatgtttaagaacttggctggagcatatccatcatactctaccaactgggccgacgaaaccgtgttaacggctcgtaacataggcctatgcagctctgacgttatggagcggtcacgtagagggatgtccattcttagaaagaagtatttgaaaccatccaacaatgttctattctctgttggctcgaccatctaccacgagaagagggacttactgaggagctggcacctgccgtctgtatttcacttacgtggcaagcaaaattacacatgtcggtgtgagactatagttagttgcgacgggtacgtcgttaaaagaatagctatcagtccaggcctgtatgggaagccttcaggctatgctgctacgatgcaccgcgagggattcttgtgctgcaaagtgacagacacattgaacggggagagggtctcttttcccgtgtgcacgtatgtgccagctacattgtgtgaccaaatgactggcatactggcaacagatgtcagtgcggacgacgcgcaaaaactgctggttgggctcaaccagcgtatagtcgtcaacggtcgcacccagagaaacaccaataccatgaaaaattaccttttgcccgtagtggcccaggcatttgctaggtgggcaaaggaatataaggaagatcaagaagatgaaaggccactaggactacgagatagacagttagtcatggggtgttgttgggcttttagaaggcacaagataacatctatttataagcgcccggatacccaaaccatcatcaaagtgaacagcgatttccactcattcgtgctgcccaggataggcagtaacacattggagatcgggctgagaacaagaatcaggaaaatgttagaggagcacaaggagccgtcacctctcattaccgccgaggacgtacaagaagctaagtgcgcagccgatgaggctaaggaggtgcgtgaagccgaggagttgcgcgcagctctaccacctttggcagctgatgttgaggagcccactctggaagccgatgtcgacttgatgttacaagaggctggggccggctcagtggagacacctcgtggcttgataaaggttaccagctacgctggcgaggacaagatcggctcttacgctgtgctttctccgcaggctgtactcaagagtgaaaaattatcttgcatccaccctctcgctgaacaagtcatagtgataacacactctggccgaaaagggcgttatgccgtggaaccataccatggtaaagtagtggtgccagagggacatgcaatacccgtccaggactttcaagctctgagtgaaagtgccaccattgtgtacaacgaacgtgagttcgtaaacaggtacctgcaccatattgccacacatggaggagcgctgaacactgatgaagaatattacaaaactgtcaagcccagcgagcacgacggcgaatacctgtacgacatcgacaggaaacagtgcgtcaagaaagaactagtcactgggctagggctcacaggcgagctggtggatcctcccttccatgaattcgcctacgagagtctgagaacacgaccagccgctccttaccaagtaccaaccataggggtgtatggcgtgccaggatcaggcaagtctggcatcattaaaagcgcagtcaccaaaaaagatctagtggtgagcgccaagaaagaaaactgtgcagaaattataagggacgtcaagaaaatgaaagggctggacgtcaatgccagaactgtggactcagtgctcttgaatggatgcaaacaccccgtagagaccctgtatattgacgaagcttttgcttgtcatgcaggtactctcagagcgctcatagccattataagacctaaaaaggcagtgctctgcggggatcccaaacagtgcggtttttttaacatgatgtgcctgaaagtgcattttaaccacgagatttgcacacaagtcttccacaaaagcatctctcgccgttgcactaaatctgtgacttcggtcgtctcaaccttgttttacgacaaaaaaatgagaacgacgaatccgaaagagactaagattgtgattgacactaccggcagtaccaaacctaagcaggacgatctcattctcacttgtttcagagggtgggtgaagcagttgcaaatagattacaaaggcaacgaaataatgacggcagctgcctctcaagggctgacccgtaaaggtgtgtatgccgttcggtacaaggtgaatgaaaatcctctgtacgcacccacctcagaacatgtgaacgtcctactgacccgcacggaggaccgcatcgtgtggaaaacactagccggcgacccatggataaaaacactgactgccaagtaccctgggaatttcactgccacgatagaggagtggcaagcagagcatgatgccatcatgaggcacatcttggagagaccggaccctaccgacgtcttccagaataaggcaaacgtgtgttgggccaaggctttagtgccggtgctgaagaccgctggcatagacatgaccactgaacaatggaacactgtggattattttgaaacggacaaagctcactcagcagagatagtattgaaccaactatgcgtgaggttctttggactcgatctggactccggtctattttctgcacccactgttccgttatccattaggaataatcactgggataactccccgtcgcctaacatgtacgggctgaataaagaagtggtccgtcagctctctcgcaggtacccacaactgcctcgggcagttgccactggaagagtctatgacatgaacactggtacactgcgcaattatgatccgcgcataaacctagtacctgtaaacagaagactgcctcatgctttagtcctccaccataatgaacacccacagagtgacttttcttcattcgtcagcaaattgaagggcagaactgtcctggtggtcggggaaaagttgtccgtcccaggcaaaatggttgactggttgtcagaccggcctgaggctaccttcagagctcggctggatttaggcatcccaggtgatgtgcccaaatatgacataatatttgttaatgtgaggaccccatataaataccatcactatcagcagtgtgaagaccatgccattaagcttagcatgttgaccaagaaagcttgtctgcatctgaatcccggcggaacctgtgtcagcataggttatggttacgctgacagggccagcgaaagcatcattggtgctatagcgcggcagttcaagttttcccgggtatgcaaaccgaaatcctcacttgaagagacggaagttctgtttgtattcattgggtacgatcgcaaggcccgtacgcacaatccttacaagctttcatcaaccttgaccaacatttatacaggttccagactccacgaagccggatgtgcaccctcatatcatgtggtgcgaggggatattgccacggccaccgaaggagtgattataaatgctgctaacagcaaaggacaacctggcggaggggtgtgcggagcgctgtataagaaattcccggaaagcttcgatttacagccgatcgaagtaggaaaagcgcgactggtcaaaggtgcagctaaacatatcattcatgccgtaggaccaaacttcaacaaagtttcggaggttgaaggtgacaaacagttggcagaggcttatgagtccatcgctaagattgtcaacgataacaattacaagtcagtagcgattccactgttgtccaccggcatcttttccgggaacaaagatcgactaacccaatcattgaaccatttgctgacagctttagacaccactgatgcagatgtagccatatactgcagggacaagaaatgggaaatgactctcaaggaagcagtggctaggagagaagcagtggaggagatatgcatatccgacgactcttcagtgacagaacctgatgcagagctggtgagggtgcatccgaagagttctttggctggaaggaagggctacagcacaagcgatggcaaaactttctcatatttggaagggaccaagtttcaccaggcggccaaggatatagcagaaattaatgccatgtggcccgttgcaacggaggccaatgagcaggtatgcatgtatatcctcggagaaagcatgagcagtattaggtcgaaatgccccgtcgaagagtcggaagcctccacaccacctagcacgctgccttgcttgtgcatccatgccatgactccagaaagagtacagcgcctaaaagcctcacgtccagaacaaattactgtgtgctcatcctttccattgccgaagtatagaatcactggtgtgcagaagatccaatgctcccagcctatattgttctcaccgaaagtgcctgcgtatattcatccaaggaagtatctcgtggaaacaccaccggtagacgagactccggagccatcggcagagaaccaatccacagaggggacacctgaacaaccaccacttataaccgaggatgagaccaggactagaacgcctgagccgatcatcatcgaagaggaagaagaggatagcataagtttgctgtcagatggcccgacccaccaggtgctgcaagtcgaggcagacattcacgggccgccctctgtatctagctcatcctggtccattcctcatgcatccgactttgatgtggacagtttatccatacttgacaccctggagggagctagcgtgaccagcggggcaacgtcagccgagactaactcttacttcgcaaagagtatggagtttctggcgcgaccggtgcctgcgcctcgaacagtattcaggaaccctccacatcccgctccgcgcacaagaacaccgtcacttgcacccagcagggcctgctcgagaaccagcctagtttccaccccgccaggcgtgaatagggtgatcactagagaggagctcgaggcgcttaccccgtcacgcactcctagcaggtcggtctcgagaaccagcctggtctccaacccgccaggcgtaaatagggtgattacaagagaggagtttgaggcgttcgtagcacaacaacaatgacggtttgatgcgggtgcatacatcttttcctccgacaccggtcaagggcatttacaacaaaaatcagtaaggcaaacggtgctatccgaagtggtgttggagaggaccgaattggagatttcgtatgccccgcgcctcgaccaagaaaaagaagaattactacgcaagaaattacagttaaatcccacacctgctaacagaagcagataccagtccaggaaggtggagaacatgaaagccataacagctagacgtattctgcaaggcctagggcattatttgaaggcagaaggaaaagtggagtgctaccgaaccctgcatcctgttcctttgtattcatctagtgtgaaccgtgccttttcaagccccaaggtcgcagtggaagcctgtaacgccatgttgaaagagaactttccgactgtggcttcttactgtattattccagagtacgatgcctatttggacatggttgacggagcttcatgctgcttagacactgccagtttttgccctgcaaagctgcgcagctttccaaagaaacactcctatttggaacccacaatacgatcggcagtgccttcagcgatccagaacacgctccagaacgtcctggcagctgccacaaaaagaaattgcaatgtcacgcaaatgagagaattgcccgtattggattcggcggcctttaatgtggaatgcttcaagaaatatgcgtgtaataatgaatattgggaaacgtttaaagaaaaccccatcaggcttactgaagaaaacgtggtaaattacattaccaaattaaaaggaccaaaagctgctgctctttttgcgaagacacataatttgaatatgttgcaggacataccaatggacaggtttgtaatggacttaaagagagacgtgaaagtgactccaggaacaaaacatactgaagaacggcccaaggtacaggtgatccaggctgccgatccgctagcaacagcgtatctgtgcggaatccaccgagagctggttaggagattaaatgcggtcctgcttccgaacattcatacactgtttgatatgtcggctgaagactttgacgctattatagccgagcacttccagcctggggattgtgttctggaaactgacatcgcgtcgtttgataaaagtgaggacgacgccatggctctgaccgcgttaatgattctggaagacttaggtgtggacgcagagctgttgacgctgattgaggcggctttcggcgaaatttcatcaatacatttgcccactaaaactaaatttaaattcggagccatgatgaaatctggaatgttcctcacactgtttgtgaacacagtcattaacattgtaatcgcaagcagagtgttgagagaacggctaaccggatcaccatgtgcagcattcattggagatgacaatatcgtgaaaggagtcaaatcggacaaattaatggcagacaggtgcgccacctggttgaatatggaagtcaagattatagatgctgtggtgggcgagaaagcgccttatttctgtggagggtttattttgtgtgactccgtgaccggcacagcgtgccgtgtggcagaccccctaaaaaggctgtttaagcttggcaaacctctggcagcagacgatgaacatgatgatgacaggagaagggcattgcatgaagagtcaacacgctggaaccgagtgggtattctttcagagctgtgcaaggcagtagaatcaaggtatgaaaccgtaggaacttccatcatagttatggccatgactactctagctagcagtgttaaatcattcagctacctgagaggggcccctataactctctacggctaacctgaatggactacgacatagtctagtccgccaagatgttcccgttccagccaatgtatccgatgcagccaatgccctatcgcaacccgttcgcggccccgcgcaggccctggttccccagaaccgacccttttctggcgatgcaggtgcaggaattaacccgctcgatggctaacctgacgttcaagcaacgccgggacgcgccacctgaggggccatccgctaagaaaccgaagaaggaggcctcgcaaaaacagaaagggggaggccaagggaagaagaagaagaaccaagggaagaagaaggctaagacagggccgcctaatccgaaggcacagaatggaaacaagaagaagaccaacaagaaaccaggcaagagacagcgcatggtcatgaaattggaatctgacaagacgttcccaatcatgttggaagggaagataaacggctacgcttgtgtggtcggagggaagttattcaggccgatgcatgtggaaggcaagatcgacaacgacgttctggccgcgcttaagacgaagaaagcatccaaatacgatcttgagtatgcagatgtgccacagaacatgcgggccgatacattcaaatacacccatgagaaaccccaaggctattacagctggcatcatggagcagtccaatatgaaaatgggcgtttcacggtgccgaaaggagttggggccaagggagacagcggacgacccattctggataaccagggacgggtggtcgctattgtgctgggaggtgtgaatgaaggatctaggacagccctttcagtcgtcatgtggaacgagaagggagttaccgtgaagtatactccggagaactgcgagcaatggtcactagtgaccaccatgtgtctgctcgccaatgtgacgttcccatgtgctcaaccaccaatttgctacgacagaaaaccagcagagactttggccatgctcagcgttaacgttgacaacccgggctacgatgagctgctggaagcagctgttaagtgccccggaaggaaaaggagatccaccgaggagctgtttaaggagtataagctaacgcgcccttacatggccagatgcatcagatgtgcagttgggagctgccatagtccaatagcaatcgaggcagtaaagagcgacgggcacgacggttatgttagacttcagacttcctcgcagtatggcctggattcctccggcaacttaaagggcaggaccatgcggtatgacatgcacgggaccattaaagagataccactacatcaagtgtcactccatacatctcgcccgtgtcacattgtggatgggcacggttatttcctgcttgccaggtgcccggcaggggactccatcaccatggaatttaagaaagattccgtcacacactcctgctcggtgccgtatgaagtgaaatttaatcctgtaggcagagaactctatactcatcccccagaacacggagtagagcaagcgtgccaagtctacgcacatgatgcacagaacagaggagcttatgtcgagatgcacctcccgggctcagaagtggacagcagtttggtttccttgagcggcagttcagtcaccgtgacacctcctgttgggactagcgccctggtggaatgcgagtgtggcggcacaaagatctccgagaccatcaacaagacaaaacagttcagccagtgcacaaagaaggagcagtgcagagcatatcggctgcagaacgataagtgggtgtataattctgacaaactgcccaaagcagcgggagccaccttaaaaggaaaactgcatgtcccattcttgctggcagacggcaaatgcaccgtgcctctagcaccagaacctatgataacctttggtttcagatcagtgtcactgaaactgcaccctaagaatcccacatatctaaccacccgccaacttgctgatgagcctcactacacgcacgagctcatatctgaaccagctgttaggaattttaccgtcaccgaaaaagggtgggagtttgtatggggaaaccacccgccgaaaaggttttgggcacaggaaacagcacccggaaatccacatgggctaccgcacgaggtgataactcattattaccacagataccctatgtccaccatcctgggtttgtcaatttgtgccgccattgcaaccgtttccgttgcagcgtctacctggctgttttgcagatctagagttgcgtgcctaactccttaccggctaacacctaacgctaggataccattttgtctggctgtgctttgctgcgcccgcactgcccgggccgagaccacctgggagtccttggatcacctatggaacaataaccaacagatgttctggattcaattgctgatccctctggccgccttgatcgtagtgactcgcctgctcaggtgcgtgtgctgtgtcgtgccttttttagtcatggccggcgccgcaggcgccggcgcctacgagcacgcgaccacgatgccgagccaagcgggaatctcgtataacactatagtcaacagagcaggctacgcaccactccctatcagcataacaccaacaaagatcaagctgatacctacagtgaacttggagtacgtcacctgccactacaaaacaggaatggattcaccagccatcaaatgctgcggatctcaggaatgcactccaacttacaggcctgatgaacagtgcaaagtcttcacaggggtttacccgttcatgtggggtggtgcatattgcttttgcgacactgagaacacccaagtcagcaaggcctacgtaatgaaatctgacgactgccttgcggatcatgctgaagcatataaagcgcacacagcctcagtgcaggcgttcctcaacatcacagtgggagaacactctattgtgactaccgtgtatgtgaatggagaaactcctgtgaatttcaatggggtcaaattaactgcaggtccgctttccacagcttggacaccctttgatcgcaaaatcgtgcagtatgccggggagatctataattatgattttcctgagtatggggcaggacaaccaggagcatttggagatatacaatccagaacagtctcaagctcagatctgtatgccaataccaacctagtgctgcagagacccaaagcaggagcgatccacgtgccatacactcaggcaccttcgggttttgagcaatggaagaaagataaagctccatcattgaaatttaccgcccctttcggatgcgaaatatatacaaaccccattcgcgccgaaaactgtgctgtagggtcaattccattagcctttgacattcccgacgccttgttcaccagggtgtcagaaacaccgacactttcagcggccgaatgcactcttaacgagtgcgtgtattcttccgactttggtgggatcgccacggtcaagtactcggccagcaagtcaggcaagtgcgcagtccatgtgccatcagggactgctaccctaaaagaagcagcagtcgagctaaccgagcaagggtcggcgactatccatttctcgaccgcaaatatccacccggagttcaggctccaaatatgcacatcatatgttacgtgcaaaggtgattgtcaccccccgaaagaccatattgtgacacaccctcagtatcacgcccaaacatttacagccgcggtgtcaaaaaccgcgtggacgtggttaacatccctgctgggaggatcagccgtaattattataattggcttggtgctggctactattgtggccatgtacgtgctgaccaaccagaaacataattgaatacagcagcaattggcaagctgcttacatagaactcgcggcgattggcatgccgccttaaaatttttattttattttttcttttcttttccgaatcggattttgtttttaatatttc

SEQ ID NO: 4 - DNA, 9577 bp, Artificial Sequence
  Description of Artificial Sequence: Synthetic polynucleotide
atgggcggcgcatgagagaagcccagaccaattacctacccaaaatggagaaagttcacgttgacatcgaggaagacagcccattcctcagagctttgcagcggagcttcccgcagtttgaggtagaagccaagcaggtcactgataatgaccatgctaatgccagagcgttttcgcatctggcttcaaaactgatcgaaacggaggtggacccatccgacacgatccttgacattggaagtgcgcccgcccgcagaatgtattctaagcacaagtatcattgtatctgtccgatgagatgtgcggaagatccggacagattgtataagtatgcaactaagctgaagaaaaactgtaaggaaataactgataaggaattggacaagaaaatgaaggagctcgccgccgtcatgagcgaccctgacctggaaactgagactatgtgcctccacgacgacgagtcgtgtcgctacgaagggcaagtcgctgtttaccaggatgtatacgcggttgacggaccgacaagtctctatcaccaagccaataagggagttagagtcgcctactggataggctttgacaccaccccttttatgtttaagaacttggctggagcatatccatcatactctaccaactgggccgacgaaaccgtgttaacggctcgtaacataggcctatgcagctctgacgttatggagcggtcacgtagagggatgtccattcttagaaagaagtatttgaaaccatccaacaatgttctattctctgttggctcgaccatctaccacgagaagagggacttactgaggagctggcacctgccgtctgtatttcacttacgtggcaagcaaaattacacatgtcggtgtgagactatagttagttgcgacgggtacgtcgttaaaagaatagctatcagtccaggcctgtatgggaagccttcaggctatgctgctacgatgcaccgcgagggattcttgtgctgcaaagtgacagacacattgaacggggagagggtctcttttcccgtgtgcacgtatgtgccagctacattgtgtgaccaaatgactggcatactggcaacagatgtcagtgcggacgacgcgcaaaaactgctggttgggctcaaccagcgtatagtcgtcaacggtcgcacccagagaaacaccaataccatgaaaaattaccttttgcccgtagtggcccaggcatttgctaggtgggcaaaggaatataaggaagatcaagaagatgaaaggccactaggactacgagatagacagttagtcatggggtgttgttgggcttttagaaggcacaagataacatctatttataagcgcccggatacccaaaccatcatcaaagtgaacagcgatttccactcattcgtgctgcccaggataggcagtaacacattggagatcgggctgagaacaagaatcaggaaaatgttagaggagcacaaggagccgtcacctctcattaccgccgaggacgtacaagaagctaagtgcgcagccgatgaggctaaggaggtgcgtgaagccgaggagttgcgcgcagctctaccacctttggcagctgatgttgaggagcccactctggaagccgatgtcgacttgatgttacaagaggctggggccggctcagtggagacacctcgtggcttgataaaggttaccagctacgctggcgaggacaagatcggctcttacgctgtgctttctccgcaggctgtactcaagagtgaaaaattatcttgcatccaccctctcgctgaacaagtcatagtgataacacactctggccgaaaagggcgttatgccgtggaaccataccatggtaaagtagtggtgccagagggacatgcaatacccgtccaggactttcaagctctgagtgaaagtgccaccattgtgtacaacgaacgtgagttcgtaaacaggtacctgcaccatattgccacacatggaggagcgctgaacactgatgaagaatattacaaaactgtcaagcccagcgagcacgacggcgaatacctgtacgacatcgacaggaaacagtgcgtcaagaaagaactagtcactgggctagggctcacaggcgagctggtggatcctcccttccatgaattcgcctacgagagtctgagaacacgaccagccgctccttaccaagtaccaaccataggggtgtatggcgtgccaggatcaggcaagtctggcatcattaaaagcgcagtcaccaaaaaagatctagtggtgagcgccaagaaagaaaactgtgcagaaattataagggacgtcaagaaaatgaaagggctggacgtcaatgccagaactgtggactcagtgctcttgaatggatgcaaacaccccgtagagaccctgtatattgacgaagcttttgcttgtcatgcaggtactctcagagcgctcatagccattataagacctaaaaaggcagtgctctgcggggatcccaaacagtgcggtttttttaacatgatgtgcctgaaagtgcattttaaccacgagatttgcacacaagtcttccacaaaagcatctctcgccgttgcactaaatctgtgacttcggtcgtctcaaccttgttttacgacaaaaaaatgagaacgacgaatccgaaagagactaagattgtgattgacactaccggcagtaccaaacctaagcaggacgatctcattctcacttgtttcagagggtgggtgaagcagttgcaaatagattacaaaggcaacgaaataatgacggcagctgcctctcaagggctgacccgtaaaggtgtgtatgccgttcggtacaaggtgaatgaaaatcctctgtacgcacccacctcagaacatgtgaacgtcctactgacccgcacggaggaccgcatcgtgtggaaaacactagccggcgacccatggataaaaacactgactgccaagtaccctgggaatttcactgccacgatagaggagtggcaagcagagcatgatgccatcatgaggcacatcttggagagaccggaccctaccgacgtcttccagaataaggcaaacgtgtgttgggccaaggctttagtgccggtgctgaagaccgctggcatagacatgaccactgaacaatggaacactgtggattattttgaaacggacaaagctcactcagcagagatagtattgaaccaactatgcgtgaggttctttggactcgatctggactccggtctattttctgcacccactgttccgttatccattaggaataatcactgggataactccccgtcgcctaacatgtacgggctgaataaagaagtggtccgtcagctctctcgcaggtacccacaactgcctcgggcagttgccactggaagagtctatgacatgaacactggtacactgcgcaattatgatccgcgcataaacctagtacctgtaaacagaagactgcctcatgctttagtcctccaccataatgaacacccacagagtgacttttcttcattcgtcagcaaattgaagggcagaactgtcctggtggtcggggaaaagttgtccgtcccaggcaaaatggttgactggttgtcagaccggcctgaggctaccttcagagctcggctggatttaggcatcccaggtgatgtgcccaaatatgacataatatttgttaatgtgaggaccccatataaataccatcactatcagcagtgtgaagaccatgccattaagcttagcatgttgaccaagaaagcttgtctgcatctgaatcccggcggaacctgtgtcagcataggttatggttacgctgacagggccagcgaaagcatcattggtgctatagcgcggcagttcaagttttcccgggtatgcaaaccgaaatcctcacttgaagagacggaagttctgtttgtattcattgggtacgatcgcaaggcccgtacgcacaatccttacaagctttcatcaaccttgaccaacatttatacaggttccagactccacgaagccggatgtgcaccctcatatcatgtggtgcgaggggatattgccacggccaccgaaggagtgattataaatgctgctaacagcaaaggacaacctggcggaggggtgtgcggagcgctgtataagaaattcccggaaagcttcgatttacagccgatcgaagtaggaaaagcgcgactggtcaaaggtgcagctaaacatatcattcatgccgtaggaccaaacttcaacaaagtttcggaggttgaaggtgacaaacagttggcagaggcttatgagtccatcgctaagattgtcaacgataacaattacaagtcagtagcgattccactgttgtccaccggcatcttttccgggaacaaagatcgactaacccaatcattgaaccatttgctgacagctttagacaccactgatgcagatgtagccatatactgcagggacaagaaatgggaaatgactctcaaggaagcagtggctaggagagaagcagtggaggagatatgcatatccgacgactcttcagtgacagaacctgatgcagagctggtgagggtgcatccgaagagttctttggctggaaggaagggctacagcacaagcgatggcaaaactttctcatatttggaagggaccaagtttcaccaggcggccaaggatatagcagaaattaatgccatgtggcccgttgcaacggaggccaatgagcaggtatgcatgtatatcctcggagaaagcatgagcagtattaggtcgaaatgccccgtcgaagagtcggaagcctccacaccacctagcacgctgccttgcttgtgcatccatgccatgactccagaaagagtacagcgcctaaaagcctcacgtccagaacaaattactgtgtgctcatcctttccattgccgaagtatagaatcactggtgtgcagaagatccaatgctcccagcctatattgttctcaccgaaagtgcctgcgtatattcatccaaggaagtatctcgtggaaacaccaccggtagacgagactccggagccatcggcagagaaccaatccacagaggggacacctgaacaaccaccacttataaccgaggatgagaccaggactagaacgcctgagccgatcatcatcgaagaggaagaagaggatagcataagtttgctgtcagatggcccgacccaccaggtgctgcaagtcgaggcagacattcacgggccgccctctgtatctagctcatcctggtccattcctcatgcatccgactttgatgtggacagtttatccatacttgacaccctggagggagctagcgtgaccagcggggcaacgtcagccgagactaactcttacttcgcaaagagtatggagtttctggcgcgaccggtgcctgcgcctcgaacagtattcaggaaccctccacatcccgctccgcgcacaagaacaccgtcacttgcacccagcagggcctgctcgagaaccagcctagtttccaccccgccaggcgtgaatagggtgatcactagagaggagctcgaggcgcttaccccgtcacgcactcctagcaggtcggtctcgagaaccagcctggtctccaacccgccaggcgtaaatagggtgattacaagagaggagtttgaggcgttcgtagcacaacaacaatgacggtttgatgcgggtgcatacatcttttcctccgacaccggtcaagggcatttacaacaaaaatcagtaaggcaaacggtgctatccgaagtggtgttggagaggaccgaattggagatttcgtatgccccgcgcctcgaccaagaaaaagaagaattactacgcaagaaattacagttaaatcccacacctgctaacagaagcagataccagtccaggaaggtggagaacatgaaagccataacagctagacgtattctgcaaggcctagggcattatttgaaggcagaaggaaaagtggagtgctaccgaaccctgcatcctgttcctttgtattcatctagtgtgaaccgtgccttttcaagccccaaggtcgcagtggaagcctgtaacgccatgttgaaagagaactttccgactgtggcttcttactgtattattccagagtacgatgcctatttggacatggttgacggagcttcatgctgcttagacactgccagtttttgccctgcaaagctgcgcagctttccaaagaaacactcctatttggaacccacaatacgatcggcagtgccttcagcgatccagaacacgctccagaacgtcctggcagctgccacaaaaagaaattgcaatgtcacgcaaatgagagaattgcccgtattggattcggcggcctttaatgtggaatgcttcaagaaatatgcgtgtaataatgaatattgggaaacgtttaaagaaaaccccatcaggcttactgaagaaaacgtggtaaattacattaccaaattaaaaggaccaaaagctgctgctctttttgcgaagacacataatttgaatatgttgcaggacataccaatggacaggtttgtaatggacttaaagagagacgtgaaagtgactccaggaacaaaacatactgaagaacggcccaaggtacaggtgatccaggctgccgatccgctagcaacagcgtatctgtgcggaatccaccgagagctggttaggagattaaatgcggtcctgcttccgaacattcatacactgtttgatatgtcggctgaagactttgacgctattatagccgagcacttccagcctggggattgtgttctggaaactgacatcgcgtcgtttgataaaagtgaggacgacgccatggctctgaccgcgttaatgattctggaagacttaggtgtggacgcagagctgttgacgctgattgaggcggctttcggcgaaatttcatcaatacatttgcccactaaaactaaatttaaattcggagccatgatgaaatctggaatgttcctcacactgtttgtgaacacagtcattaacattgtaatcgcaagcagagtgttgagagaacggctaaccggatcaccatgtgcagcattcattggagatgacaatatcgtgaaaggagtcaaatcggacaaattaatggcagacaggtgcgccacctggttgaatatggaagtcaagattatagatgctgtggtgggcgagaaagcgccttatttctgtggagggtttattttgtgtgactccgtgaccggcacagcgtgccgtgtggcagaccccctaaaaaggctgtttaagcttggcaaacctctggcagcagacgatgaacatgatgatgacaggagaagggcattgcatgaagagtcaacacgctggaaccgagtgggtattctttcagagctgtgcaaggcagtagaatcaaggtatgaaaccgtaggaacttccatcatagttatggccatgactactctagctagcagtgttaaatcattcagctacctgagaggggcccctataactctctacggctaacctgaatggactacgactctagaatagtctttaattaagccaccatggcaggcatgtttcaggcgctgagcgaaggctgcaccccgtatgatattaaccagatgctgaacgtgctgggcgatcatcaggtctcaggccttgagcagcttgagagtataatcaactttgaaaaactgactgaatggaccagttctaatgttatgcctatcctgtctcctctgacaaagggcatcctgggcttcgtgtttaccctgaccgtgccttctgagagaggacttagctgcattagcgaagcggatgcgaccaccccggaaagcgcgaacctgggcgaagaaattctgagccagctgtatctttggccaagggtgacctaccattcccctagttatgcttaccaccaatttgaaagacgagccaaatataaaagacacttccccggctttggccagagcctgctgtttggctaccctgtgtacgtgttcggcgattgcgtgcagggcgattgggatgcgattcgctttcgctattgcgcgccgccgggctatgcgctgctgcgctgcaacgataccaactatagcgctctgctggctgtgggggccctagaaggacccaggaatcaggactggcttggtgtcccaagacaacttgtaactcggatgcaggctattcagaatgccggcctgtgtaccctggtggccatgctggaagagacaatcttctggctgcaagcgtttctgatggcgctgaccgatagcggcccgaaaaccaacattattgtggatagccagtatgtgatgggcattagcaaaccgagctttcaggaatttgtggattgggaaaacgtgagcccggaactgaacagcaccgatcagccgttttggcaagccggaatcctggccagaaatctggtgcctatggtggccacagtgcagggccagaacctgaagtaccagggtcagtcactagtcatctctgcttctatcattgtcttcaacctgctggaactggaaggtgattatcgagatgatggcaacgtgtgggtgcataccccgctgagcccgcgcaccctgaacgcgtgggtgaaagcggtggaagaaaaaaaaggtattccagttcacctagagctggccagtatgaccaacatggagctcatgagcagtattgtgcatcagcaggtcagaacatacggccccgtgttcatgtgtctcggcggactgcttacaatggtggctggtgctgtgtggctgacagtgcgagtgctcgagctgttccgggccgcgcagctggccaacgacgtggtcctccagatcatggagctttgtggtgcagcgtttcgccaggtgtgccataccaccgtgccgtggccgaacgcgagcctgaccccgaaatggaacaacgaaaccacccagccccagatcgccaactgcagcgtgtatgacttttttgtgtggctccattattattctgttcgagacacactttggccaagggtgacctaccatatgaacaaatatgcgtatcatatgctggaaagacgagccaaatataaaagaggaccaggacctggcgctaaatttgtggccgcctggacactgaaagccgctgctggtcctggacctggccagtacatcaaggccaacagcaagttcatcggcatcaccgaactcggacccggaccaggctgatgattcgaacggccgtatcacgcccaaacatttacagccgcggtgtcaaaaaccgcgtggacgtggttaacatccctgctgggaggatcagccgtaattattataattggcttggtgctggctactattgtggccatgtacgtgctgaccaaccagaaacataattgaatacagcagcaattggcaagctgcttacatagaactcgcggcgattggcatgccgccttaaaatttttattttattttttcttttcttttccgaatcggattttgtttttaatatttcaaaaaaaaaaaaaaaaaaaaaaaaaaaaaaaaaaaaaaaaaaaaaaaaaaaaaaaaaaaaaaaaaaaaaaaaaaaaaaaa

SEQ ID NO: 5 - DNA, 11447 bp, Venezuelan equine encephalitis virus; identical to SEQ ID NO: 3

SEQ ID NO: 6 - DNA, 7894 bp, Artificial Sequence
  Description of Artificial Sequence: Synthetic polynucleotide
atgggcggcgcatgagagaagcccagaccaattacctacccaaaatggagaaagttcacgttgacatcgaggaagacagcccattcctcagagctttgcagcggagcttcccgcagtttgaggtagaagccaagcaggtcactgataatgaccatgctaatgccagagcgttttcgcatctggcttcaaaactgatcgaaacggaggtggacccatccgacacgatccttgacattggaagtgcgcccgcccgcagaatgtattctaagcacaagtatcattgtatctgtccgatgagatgtgcggaagatccggacagattgtataagtatgcaactaagctgaagaaaaactgtaaggaaataactgataaggaattggacaagaaaatgaaggagctcgccgccgtcatgagcgaccctgacctggaaactgagactatgtgcctccacgacgacgagtcgtgtcgctacgaagggcaagtcgctgtttaccaggatgtatacgcggttgacggaccgacaagtctctatcaccaagccaataagggagttagagtcgcctactggataggctttgacaccaccccttttatgtttaagaacttggctggagcatatccatcatactctaccaactgggccgacgaaaccgtgttaacggctcgtaacataggcctatgcagctctgacgttatggagcggtcacgtagagggatgtccattcttagaaagaagtatttgaaaccatccaacaatgttctattctctgttggctcgaccatctaccacgagaagagggacttactgaggagctggcacctgccgtctgtatttcacttacgtggcaagcaaaattacacatgtcggtgtgagactatagttagttgcgacgggtacgtcgttaaaagaatagctatcagtccaggcctgtatgggaagccttcaggctatgctgctacgatgcaccgcgagggattcttgtgctgcaaagtgacagacacattgaacggggagagggtctcttttcccgtgtgcacgtatgtgccagctacattgtgtgaccaaatgactggcatactggcaacagatgtcagtgcggacgacgcgcaaaaactgctggttgggctcaaccagcgtatagtcgtcaacggtcgcacccagagaaacaccaataccatgaaaaattaccttttgcccgtagtggcccaggcatttgctaggtgggcaaaggaatataaggaagatcaagaagatgaaaggccactaggactacgagatagacagttagtcatggggtgttgttgggcttttagaaggcacaagataacatctatttataagcgcccggatacccaaaccatcatcaaagtgaacagcgatttccactcattcgtgctgcccaggataggcagtaacacattggagatcgggctgagaacaagaatcaggaaaatgttagaggagcacaaggagccgtcacctctcattaccgccgaggacgtacaagaagctaagtgcgcagccgatgaggctaaggaggtgcgtgaagccgaggagttgcgcgcagctctaccacctttggcagctgatgttgaggagcccactctggaagccgatgtcgacttgatgttacaagaggctggggccggctcagtggagacacctcgtggcttgataaaggttaccagctacgctggcgaggacaagatcggctcttacgctgtgctttctccgcaggctgtactcaagagtgaaaaattatcttgcatccaccctctcgctgaacaagtcatagtgataacacactctggccgaaaagggcgttatgccgtggaaccataccatggtaaagtagtggtgccagagggacatgcaatacccgtccaggactttcaagctctgagtgaaagtgccaccattgtgtacaacgaacgtgagttcgtaaacaggtacctgcaccatattgccacacatggaggagcgctgaacactgatgaagaatattacaaaactgtcaagcccagcgagcacgacggcgaatacctgtacgacatcgacaggaaacagtgcgtcaagaaagaactagtcactgggctagggctcacaggcgagctggtggatcctcccttccatgaattcgcctacgagagtctgagaacacgaccagccgctccttaccaagtaccaaccataggggtgtatggcgtgccaggatcaggcaagtctggcatcattaaaagcgcagtcaccaaaaaagatctagtggtgagcgccaagaaagaaaactgtgcagaaattataagggacgtcaagaaaatgaaagggctggacgtcaatgccagaactgtggactcagtgctcttgaatggatgcaaacaccccgtagagaccctgtatattgacgaagcttttgcttgtcatgcaggtactctcagagcgctcatagccattataagacctaaaaaggcagtgctctgcggggatcccaaacagtgcggtttttttaacatgatgtgcctgaaagtgcattttaaccacgagatttgcacacaagtcttccacaaaagcatctctcgccgttgcactaaatctgtgacttcggtcgtctcaaccttgttttacgacaaaaaaatgagaacgacgaatccgaaagagactaagattgtgattgacactaccggcagtaccaaacctaagcaggacgatctcattctcacttgtttcagagggtgggtgaagcagttgcaaatagattacaaaggcaacgaaataatgacggcagctgcctctcaagggctgacccgtaaaggtgtgtatgccgttcggtacaaggtgaatgaaaatcctctgtacgcacccacctcagaacatgtgaacgtcctactgacccgcacggaggaccgcatcgtgtggaaaacactagccggcgacccatggataaaaacactgactgccaagtaccctgggaatttcactgccacgatagaggagtggcaagcagagcatgatgccatcatgaggcacatcttggagagaccggaccctaccgacgtcttccagaataaggcaaacgtgtgttgggccaaggctttagtgccggtgctgaagaccgctggcatagacatgaccactgaacaatggaacactgtggattattttgaaacggacaaagctcactcagcagagatagtattgaaccaactatgcgtgaggttctttggactcgatctggactccggtctattttctgcacccactgttccgttatccattaggaataatcactgggataactccccgtcgcctaacatgtacgggctgaataaagaagtggtccgtcagctctctcgcaggtacccacaactgcctcgggcagttgccactggaagagtctatgacatgaacactggtacactgcgcaattatgatccgcgcataaacctagtacctgtaaacagaagactgcctcatgctttagtcctccaccataatgaacacccacagagtgacttttcttcattcgtcagcaaattgaagggcagaactgtcctggtggtcggggaaaagttgtccgtcccaggcaaaatggttgactggttgtcagaccggcctgaggctaccttcagagctcggctggatttaggcatcccaggtgatgtgcccaaatatgacataatatttgttaatgtgaggaccccatataaataccatcactatcagcagtgtgaagaccatgccattaagcttagcatgttgaccaagaaagcttgtctgcatctgaatcccggcggaacctgtgtcagcataggttatggttacgctgacagggccagcgaaagcatcattggtgctatagcgcggcagttcaagttttcccgggtatgcaaaccgaaatcctcacttgaagagacggaagttctgtttgtattcattgggtacgatcgcaaggcccgtacgcacaatccttacaagctttcatcaaccttgaccaacatttatacaggttccagactccacgaagccggatgtgcaccctcatatcatgtggtgcgaggggatattgccacggccaccgaaggagtgattataaatgctgctaacagcaaaggacaacctggcggaggggtgtgcggagcgctgtataagaaattcccggaaagcttcgatttacagccgatcgaagtaggaaaagcgcgactggtcaaaggtgcagctaaacatatcattcatgccgtaggaccaaacttcaacaaagtttcggaggttgaaggtgacaaacagttggcagaggcttatgagtccatcgctaagattgtcaacgataacaattacaagtcagtagcgattccactgttgtccaccggcatcttttccgggaacaaagatcgactaacccaatcattgaaccatttgctgacagctttagacaccactgatgcagatgtagccatatactgcagggacaagaaatgggaaatgactctcaaggaagcagtggctaggagagaagcagtggaggagatatgcatatccgacgactcttcagtgacagaacctgatgcagagctggtgagggtgcatccgaagagttctttggctggaaggaagggctacagcacaagcgatggcaaaactttctcatatttggaagggaccaagtttcaccaggcggccaaggatatagcagaaattaatgccatgtggcccgttgcaacggaggccaatgagcaggtatgcatgtatatcctcggagaaagcatgagcagtattaggtcgaaatgccccgtcgaagagtcggaagcctccacaccacctagcacgctgccttgcttgtgcatccatgccatgactccagaaagagtacagcgcctaaaagcctcacgtccagaacaaattactgtgtgctcatcctttccattgccgaagtatagaatcactggtgtgcagaagatccaatgctcccagcctatattgttctcaccgaaagtgcctgcgtatattcatccaaggaagtatctcgtggaaacaccaccggtagacgagactccggagccatcggcagagaaccaatccacagaggggacacctgaacaaccaccacttataaccgaggatgagaccaggactagaacgcctgagccgatcatcatcgaagaggaagaagaggatagcataagtttgctgtcagatggcccgacccaccaggtgctgcaagtcgaggcagacattcacgggccgccctctgtatctagctcatcctggtccattcctcatgcatccgactttgatgtggacagtttatccatacttgacaccctggagggagctagcgtgaccagcggggcaacgtcagccgagactaactcttacttcgcaaagagtatggagtttctggcgcgaccggtgcctgcgcctcgaacagtattcaggaaccctccacatcccgctccgcgcacaagaacaccgtcacttgcacccagcagggcctgctcgagaaccagcctagtttccaccccgccaggcgtgaatagggtgatcactagagaggagctcgaggcgcttaccccgtcacgcactcctagcaggtcggtctcgagaaccagcctggtctccaacccgccaggcgtaaatagggtgattacaagagaggagtttgaggcgttcgtagcacaacaacaatgacggtttgatgcgggtgcatacatcttttcctccgacaccggtcaagggcatttacaacaaaaatcagtaaggcaaacggtgctatccgaagtggtgttggagaggaccgaattggagatttcgtatgccccgcgcctcgaccaagaaaaagaagaattactacgcaagaaattacagttaaatcccacacctgctaacagaagcagataccagtccaggaaggtggagaacatgaaagccataacagctagacgtattctgcaaggcctagggcattatttgaaggcagaaggaaaagtggagtgctaccgaaccctgcatcctgttcctttgtattcatctagtgtgaaccgtgccttttcaagccccaaggtcgcagtggaagcctgtaacgccatgttgaaagagaactttccgactgtggcttcttactgtattattccagagtacgatgcctatttggacatggttgacggagcttcatgctgcttagacactgccagtttttgccctgcaaagctgcgcagctttccaaagaaacactcctatttggaacccacaatacgatcggcagtgccttcagcgatccagaacacgctccagaacgtcctggcagctgccacaaaaagaaattgcaatgtcacgcaaatgagagaattgcccgtattggattcggcggcctttaatgtggaatgcttcaagaaatatgcgtgtaataatgaatattgggaaacgtttaaagaaaaccccatcaggcttactgaagaaaacgtggtaaattacattaccaaattaaaaggaccaaaagctgctgctctttttgcgaagacacataatttgaatatgttgcaggacataccaatggacaggtttgtaatggacttaaagagagacgtgaaagtgactccaggaacaaaacatactgaagaacggcccaaggtacaggtgatccaggctgccgatccgctagcaacagcgtatctgtgcggaatccaccgagagctggttaggagattaaatgcggtcctgcttccgaacattcatacactgtttgatatgtcggctgaagactttgacgctattatagccgagcacttccagcctggggattgtgttctggaaactgacatcgcgtcgtttgataaaagtgaggacgacgccatggctctgaccgcgttaatgattctggaagacttaggtgtggacgcagagctgttgacgctgattgaggcggctttcggcgaaatttcatcaatacatttgcccactaaaactaaatttaaattcggagccatgatgaaatctggaatgttcctcacactgtttgtgaacacagtcattaacattgtaatcgcaagcagagtgttgagagaacggctaaccggatcaccatgtgcagcattcattggagatgacaatatcgtgaaaggagtcaaatcggacaaattaatggcagacaggtgcgccacctggttgaatatggaagtcaagattatagatgctgtggtgggcgagaaagcgccttatttctgtggagggtttattttgtgtgactccgtgaccggcacagcgtgccgtgtggcagaccccctaaaaaggctgtttaagcttggcaaacctctggcagcagacgatgaacatgatgatgacaggagaagggcattgcatgaagagtcaacacgctggaaccgagtgggtattctttcagagctgtgcaaggcagtagaatcaaggtatgaaaccgtaggaacttccatcatagttatggccatgactactctagctagcagtgttaaatcattcagctacctgagaggggcccctataactctctacggctaacctgaatggactacgactatcacgcccaaacatttacagccgcggtgtcaaaaaccgcgtggacgtggttaacatccctgctgggaggatcagccgtaattattataattggcttggtgctggctactattgtggccatgtacgtgctgaccaaccagaaacataattgaatacagcagcaattggcaagctgcttacatagaactcgcggcgattggcatgccgccttaaaatttttattttattttttcttttcttttccgaatcggattttgtttttaatatttcaaaaaaaaaaaaaaaaaaaaaaaaaaaaaaaaaaaaaaaaaaaaaaaaaaaaaaaaaaaaaaaaaaaaaaaaaaaaaaaa

SEQ ID NO: 7 - DNA, 7893 bp, Artificial Sequence
  Description of Artificial Sequence: Synthetic polynucleotide
ataggcggcgcatgagagaagcccagaccaattacctacccaaaatggagaaagttcacgttgacatcgaggaagacagcccattcctcagagctttgcagcggagcttcccgcagtttgaggtagaagccaagcaggtcactgataatgaccatgctaatgccagagcgttttcgcatctggcttcaaaactgatcgaaacggaggtggacccatccgacacgatccttgacattggaagtgcgcccgcccgcagaatgtattctaagcacaagtatcattgtatctgtccgatgagatgtgcggaagatccggacagattgtataagtatgcaactaagctgaagaaaaactgtaaggaaataactgataaggaattggacaagaaaatgaaggagctcgccgccgtcatgagcgaccctgacctggaaactgagactatgtgcctccacgacgacgagtcgtgtcgctacgaagggcaagtcgctgtttaccaggatgtatacgcggttgacggaccgacaagtctctatcaccaagccaataagggagttagagtcgcctactggataggctttgacaccaccccttttatgtttaagaacttggctggagcatatccatcatactctaccaactgggccgacgaaaccgtgttaacggctcgtaacataggcctatgcagctctgacgttatggagcggtcacgtagagggatgtccattcttagaaagaagtatttgaaaccatccaacaatgttctattctctgttggctcgaccatctaccacgagaagagggacttactgaggagctggcacctgccgtctgtatttcacttacgtggcaagcaaaattacacatgtcggtgtgagactatagttagttgcgacgggtacgtcgttaaaagaatagctatcagtccaggcctgtatgggaagccttcaggctatgctgctacgatgcaccgcgagggattcttgtgctgcaaagtgacagacacattgaacggggagagggtctcttttcccgtgtgcacgtatgtgccagctacattgtgtgaccaaatgactggcatactggcaacagatgtcagtgcggacgacgcgcaaaaactgctggttgggctcaaccagcgtatagtcgtcaacggtcgcacccagagaaacaccaataccatgaaaaattaccttttgcccgtagtggcccaggcatttgctaggtgggcaaaggaatataaggaagatcaagaagatgaaaggccactaggactacgagatagacagttagtcatggggtgttgttgggcttttagaaggcacaagataacatctatttataagcgcccggatacccaaaccatcatcaaagtgaacagcgatttccactcattcgtgctgcccaggataggcagtaacacattggagatcgggctgagaacaagaatcaggaaaatgttagaggagcacaaggagccgtcacctctcattaccgccgaggacgtacaagaagctaagtgcgcagccgatgaggctaaggaggtgcgtgaagccgaggagttgcgcgcagctctaccacctttggcagctgatgttgaggagcccactctggaagccgatgtcgacttgatgttacaagaggctggggccggctcagtggagacacctcgtggcttgataaaggttaccagctacgatggcgaggacaagatcggctcttacgctgtgctttctccgcaggctgtactcaagagtgaaaaattatcttgcatccaccctctcgctgaacaagtcatagtgataacacactctggccgaaaagggcgttatgccgtggaaccataccatggtaaagtagtggtgccagagggacatgcaatacccgtccaggactttcaagctctgagtgaaagtgccaccattgtgtacaacgaacgtgagttcgtaaacaggtacctgcaccatattgccacacatggaggagcgctgaacactgatgaagaatattacaaaactgtcaagcccagcgagcacgacggcgaatacctgtacgacatcgacaggaaacagtgcgtcaagaaagaactagtcactgggctagggctcacaggcgagctggtggatcctcccttccatgaattcgcctacgagagtctgagaacacgaccagccgctccttaccaagtaccaaccataggggtgtatggcgtgccaggatcaggcaagtctggcatcattaaaagcgcagtcaccaaaaaagatctagtggtgagcgccaagaaagaaaactgtgcagaaattataagggacgtcaagaaaatgaaagggctggacgtcaatgccagaactgtggactcagtgctcttgaatggatgcaaacaccccgtagagaccctgtatattgacgaagcttttgcttgtcatgcaggtactctcagagcgctcatagccattataagacctaaaaaggcagtgctctgcggggatcccaaacagtgcggtttttttaacatgatgtgcctgaaagtgcattttaaccacgagatttgcacacaagtcttccacaaaagcatctctcgccgttgcactaaatctgtgacttcggtcgtctcaaccttgttttacgacaaaaaaatgagaacgacgaatccgaaagagactaagattgtgattgacactaccggcagtaccaaacctaagcaggacgatctcattctcacttgtttcagagggtgggtgaagcagttgcaaatagattacaaaggcaacgaaataatgacggcagctgcctctcaagggctgacccgtaaaggtgtgtatgccgttcggtacaaggtgaatgaaaatcctctgtacgcacccacctcagaacatgtgaacgtcctactgacccgcacggaggaccgcatcgtgtggaaaacactagccggcgacccatggataaaaacactgactgccaagtaccctgggaatttcactgccacgatagaggagtggcaagcagagcatgatgccatcatgaggcacatcttggagagaccggaccctaccgacgtcttccagaataaggcaaacgtgtgttgggccaaggctttagtgccggtgctgaagaccgctggcatagacatgaccactgaacaatggaacactgtggattattttgaaacggacaaagctcactcagcagagatagtattgaaccaactatgcgtgaggttctttggactcgatctggactccggtctattttctgcacccactgttccgttatccattaggaataatcactgggataactccccgtcgcctaacatgtacgggctgaataaagaagtggtccgtcagctctctcgcaggtacccacaactgcctcgggcagttgccactggaagagtctatgacatgaacactggtacactgcgcaattatgatccgcgcataaacctagtacctgtaaacagaagactgcctcatgctttagtcctccaccataatgaacacccacagagtgacttttcttcattcgtcagcaaattgaagggcagaactgtcctggtggtcggggaaaagttgtccgtcccaggcaaaatggttgactggttgtcagaccggcctgaggctaccttcagagctcggctggatttaggcatcccaggtgatgtgcccaaatatgacataatatttgttaatgtgaggaccccatataaataccatcactatcagcagtgtgaagaccatgccattaagcttagcatgttgaccaagaaagcttgtctgcatctgaatcccggcggaacctgtgtcagcataggttatggttacgctgacagggccagcgaaagcatcattggtgctatagcgcggcagttcaagttttcccgggtatgcaaaccgaaatcctcacttgaagagacggaagttctgtttgtattcattgggtacgatcgcaaggcccgtacgcacaatccttacaagctttcatcaaccttgaccaacatttatacaggttccagactccacgaagccggatgtgcaccctcatatcatgtggtgcgaggggatattgccacggccaccgaaggagtgattataaatgctgctaacagcaaaggacaacctggcggaggggtgtgcggagcgctgtataagaaattcccggaaagcttcgatttacagccgatcgaagtaggaaaagcgcgactggtcaaaggtgcagctaaacatatcattcatgccgtaggaccaaacttcaacaaagtttcggaggttgaaggtgacaaacagttggcagaggcttatgagtccatcgctaagattgtcaacgataacaattacaagtcagtagcgattccactgttgtccaccggcatcttttccgggaacaaagatcgactaacccaatcattgaaccatttgctgacagctttagacaccactgatgcagatgtagccatatactgcagggacaagaaatgggaaatgactctcaaggaagcagtggctaggagagaagcagtggaggagatatgcatatccgacgactcttcagtgacagaacctgatgcagagctggtgagggtgcatccgaagagttctttggctggaaggaagggctacagcacaagcgatggcaaaactttctcatatttggaagggaccaagtttcaccaggcggccaaggatatagcagaaattaatgccatgtggcccgttgcaacggaggccaatgagcaggtatgcatgtatatcctcggagaaagcatgagcagtattaggtcgaaatgccccgtcgaagagtcggaagcctccacaccacctagcacgctgccttgcttgtgcatccatgccatgactccagaaagagtacagcgcctaaaagcctcacgtccagaacaaattactgtgtgctcatcctttccattgccgaagtatagaatcactggtgtgcagaagatccaatgctcccagcctatattgttctcaccgaaagtgcctgcgtatattcatccaaggaagtatctcgtggaaacaccaccggtagacgagactccggagccatcggcagagaaccaatccacagaggggacacctgaacaaccaccacttataaccgaggatgagaccaggactagaacgcctgagccgatcatcatcgaagaggaagaagaggatagcataagtttgctgtcagatggcccgacccaccaggtgctgcaagtcgaggcagacattcacgggccgccctctgtatctagctcatcctggtccattcctcatgcatccgactttgatgtggacagtttatccatacttgacaccctggagggagctagcgtgaccagcggggcaacgtcagccgagactaactcttacttcgcaaagagtatggagtttctggcgcgaccggtgcctgcgcctcgaacagtattcaggaaccctccacatcccgctccgcgcacaagaacaccgtcacttgcacccagcagggcctgctcgagaaccagcctagtttccaccccgccaggcgtgaatagggtgatcactagagaggagctcgaggcgcttaccccgtcacgcactcctagcaggtcggtctcgagaaccagcctggtctccaacccgccaggcgtaaatagggtgattacaagagaggagtttgaggcgttcgtagcacaacaacaatgacggtttgatgcgggtgcatacatcttttcctccgacaccggtcaagggcatttacaacaaaaatcagtaaggcaaacggtgctatccgaagtggtgttggagaggaccgaattggagatttcgtatgccccgcgcctcgaccaagaaaaagaagaattactacgcaagaaattacagttaaatcccacacctgctaacagaagcagataccagtccaggaaggtggagaacatgaaagccataacagctagacgtattctgcaaggcctagggcattatttgaaggcagaaggaaaagtggagtgctaccgaaccctgcatcctgttcctttgtattcatctagtgtgaaccgtgccttttcaagccccaaggtcgcagtggaagcctgtaacgccatgttgaaagagaactttccgactgtggcttcttactgtattattccagagtacgatgcctatttggacatggttgacggagcttcatgctgcttagacactgccagtttttgccctgcaaagctgcgcagctttccaaagaaacactcctatttggaacccacaatacgatcggcagtgccttcagcgatccagaacacgctccagaacgtcctggcagctgccacaaaaagaaattgcaatgtcacgcaaatgagagaattgcccgtattggattcggcggcctttaatgtggaatgcttcaagaaatatgcgtgtaataatgaatattgggaaacgtttaaagaaaaccccatcaggcttactgaagaaaacgtggtaaattacattaccaaattaaaaggaccaaaagctgctgctctttttgcgaagacacataatttgaatatgttgcaggacataccaatggacaggtttgtaatggacttaaagagagacgtgaaagtgactccaggaacaaaacatactgaagaacggcccaaggtacaggtgatccaggctgccgatccgctagcaacagcgtatctgtgcggaatccaccgagagctggttaggagattaaatgcggtcctgcttccgaacattcatacactgtttgatatgtcggctgaagactttgacgctattatagccgagcacttccagcctggggattgtgttctggaaactgacatcgcgtcgtttgataaaagtgaggacgacgccatggctctgaccgcgttaatgattctggaagacttaggtgtggacgcagagctgttgacgctgattgaggcggctttcggcgaaatttcatcaatacatttgcccactaaaactaaatttaaattcggagccatgatgaaatctggaatgttcctcacactgtttgtgaacacagtcattaacattgtaatcgcaagcagagtgttgagagaacggctaaccggatcaccatgtgcagcattcattggagatgacaatatcgtgaaaggagtcaaatcggacaaattaatggcagacaggtgcgccacctggttgaatatggaagtcaagattatagatgctgtggtgggcgagaaagcgccttatttctgtggagggtttattttgtgtgactccgtgaccggcacagcgtgccgtgtggcagaccccctaaaaaggctgtttaagcttggcaaacctctggcagcagacgatgaacatgatgatgacaggagaagggcattgcatgaagagtcaacacgctggaaccgagtgggtattctttcagagctgtgcaaggcagtagaatcaaggtatgaaaccgtaggaacttccatcatagttatggccatgactactctagctagcagtgttaaatcattcagctacctgagaggggcccctataactctctacggctaacctgaatggactacgactatcacgcccaaacatttacagccgcggtgtcaaaaaccgcgtggacgtggttaacatccctgctgggaggatcagccgtaattattataattggcttggtgctggctactattgtggccatgtacgtgctgaccaaccagaaacataattgaatacagcagcaattggcaagctgcttacatagaactcgcggcgattggcatgccgccttaaaatttttattttatttttcttttcttttccgaatcggattttgtttttaatatttcaaaaaaaaaaaaaaaaaaaaaaaaaaaaaaaaaaaaaaaaaaaaaaaaaaaaaaaaaaaaaaaaaaaaaaaaaaaaaaaa

SEQ ID NO: 8 - DNA, 7927 bp, Artificial Sequence
  Description of Artificial Sequence: Synthetic polynucleotide
taatacgactcactataggatgggcggcgcatgagagaagcccagaccaattacctacccaaaatggagaaagttcacgttgacatcgaggaagacagcccattcctcagagctttgcagcggagcttcccgcagtttgaggtagaagccaagcaggtcactgataatgaccatgctaatgccagagcgttttcgcatctggcttcaaaactgatcgaaacggaggtggacccatccgacacgatccttgacattggaagtgcgcccgcccgcagaatgtattctaagcacaagtatcattgtatctgtccgatgagatgtgcggaagatccggacagattgtataagtatgcaactaagctgaagaaaaactgtaaggaaataactgataaggaattggacaagaaaatgaaggagctcgccgccgtcatgagcgaccctgacctggaaactgagactatgtgcctccacgacgacgagtcgtgtcgctacgaagggcaagtcgctgtttaccaggatgtatacgcggttgacggaccgacaagtctctatcaccaagccaataagggagttagagtcgcctactggataggctttgacaccaccccttttatgtttaagaacttggctggagcatatccatcatactctaccaactgggccgacgaaaccgtgttaacggctcgtaacataggcctatgcagctctgacgttatggagcggtcacgtagagggatgtccattcttagaaagaagtatttgaaaccatccaacaatgttctattctctgttggctcgaccatctaccacgagaagagggacttactgaggagctggcacctgccgtctgtatttcacttacgtggcaagcaaaattacacatgtcggtgtgagactatagttagttgcgacgggtacgtcgttaaaagaatagctatcagtccaggcctgtatgggaagccttcaggctatgctgctacgatgcaccgcgagggattcttgtgctgcaaagtgacagacacattgaacggggagagggtctcttttcccgtgtgcacgtatgtgccagctacattgtgtgaccaaatgactggcatactggcaacagatgtcagtgcggacgacgcgcaaaaactgctggttgggctcaaccagcgtatagtcgtcaacggtcgcacccagagaaacaccaataccatgaaaaattaccttttgcccgtagtggcccaggcatttgctaggtgggcaaaggaatataaggaagatcaagaagatgaaaggccactaggactacgagatagacagttagtcatggggtgttgttgggcttttagaaggcacaagataacatctatttataagcgcccggatacccaaaccatcatcaaagtgaacagcgatttccactcattcgtgctgcccaggataggcagtaacacattggagatcgggctgagaacaagaatcaggaaaatgttagaggagcacaaggagccgtcacctctcattaccgccgaggacgtacaagaagctaagtgcgcagccgatgaggctaaggaggtgcgtgaagccgaggagttgcgcgcagctctaccacctttggcagctgatgttgaggagcccactctggaagccgatgtcgacttgatgttacaagaggctggggccggctcagtggagacacctcgtggcttgataaaggttaccagctacgctggcgaggacaagatcggctcttacgctgtgctttctccgcaggctgtactcaagagtgaaaaattatcttgcatccaccctctcgctgaacaagtcatagtgataacacactctggccgaaaagggcgttatgccgtggaaccataccatggtaaagtagtggtgccagagggacatgcaatacccgtccaggactttcaagctctgagtgaaagtgccaccattgtgtacaacgaacgtgagttcgtaaacaggtacctgcaccatattgccacacatggaggagcgctgaacactgatgaagaatattacaaaactgtcaagcccagcgagcacgacggcgaatacctgtacgacatcgacaggaaacagtgcgtcaagaaagaactagtcactgggctagggctcacaggcgagctggtggatcctcccttccatgaattcgcctacgagagtctgagaacacgaccagccgctccttaccaagtaccaaccataggggtgtatggcgtgccaggatcaggcaagtctggcatcattaaaagcgcagtcaccaaaaaagatctagtggtgagcgccaagaaagaaaactgtgcagaaattataagggacgtcaagaaaatgaaagggctggacgtcaatgccagaactgtggactcagtgctcttgaatggatgcaaacaccccgtagagaccctgtatattgacgaagcttttgcttgtcatgcaggtactctcagagcgctcatagccattataagacctaaaaaggcagtgctctgcggggatcccaaacagtgcggtttttttaacatgatgtgcctgaaagtgcattttaaccacgagatttgcacacaagtcttccacaaaagcatctctcgccgttgcactaaatctgtgacttcggtcgtctcaaccttgttttacgacaaaaaaatgagaacgacgaatccgaaagagactaagattgtgattgacactaccggcagtaccaaacctaagcaggacgatctcattctcacttgtttcagagggtgggtgaagcagttgcaaatagattacaaaggcaacgaaataatgacggcagctgcctctcaagggctgacccgtaaaggtgtgtatgccgttcggtacaaggtgaatgaaaatcctctgtacgcacccacctcagaacatgtgaacgtcctactgacccgcacggaggaccgcatcgtgtggaaaacactagccggcgacccatggataaaaacactgactgccaagtaccctgggaatttcactgccacgatagaggagtggcaagcagagcatgatgccatcatgaggcacatcttggagagaccggaccctaccgacgtcttccagaataaggcaaacgtgtgttgggccaaggctttagtgccggtgctgaagaccgctggcatagacatgaccactgaacaatggaacactgtggattattttgaaacggacaaagctcactcagcagagatagtattgaaccaactatgcgtgaggttctttggactcgatctggactccggtctattttctgcacccactgttccgttatccattaggaataatcactgggataactccccgtcgcctaacatgtacgggctgaataaagaagtggtccgtcagctctctcgcaggtacccacaactgcctcgggcagttgccactggaagagtctatgacatgaacactggtacactgcgcaattatgatccgcgcataaacctagtacctgtaaacagaagactgcctcatgctttagtcctccaccataatgaacacccacagagtgacttttcttcattcgtcagcaaattgaagggcagaactgtcctggtggtcggggaaaagttgtccgtcccaggcaaaatggttgactggttgtcagaccggcctgaggctaccttcagagctcggctggatttaggcatcccaggtgatgtgcccaaatatgacataatatttgttaatgtgaggaccccatataaataccatcactatcagcagtgtgaagaccatgccattaagcttagcatgttgaccaagaaagcttgtctgcatctgaatcccggcggaacctgtgtcagcataggttatggttacgctgacagggccagcgaaagcatcattggtgctatagcgcggcagttcaagttttcccgggtatgcaaaccgaaatcctcacttgaagagacggaagttctgtttgtattcattgggtacgatcgcaaggcccgtacgcacaatccttacaagctttcatcaaccttgaccaacatttatacaggttccagactccacgaagccggatgtgcaccctcatatcatgtggtgcgaggggatattgccacggccaccgaaggagtgattataaatgctgctaacagcaaaggacaacctggcggaggggtgtgcggagcgctgtataagaaattcccggaaagcttcgatttacagccgatcgaagtaggaaaagcgcgactggtcaaaggtgcagctaaacatatcattcatgccgtaggaccaaacttcaacaaagtttcggaggttgaaggtgacaaacagttggcagaggcttatgagtccatcgctaagattgtcaacgataacaattacaagtcagtagcgattccactgttgtccaccggcatcttttccgggaacaaagatcgactaacccaatcattgaaccatttgctgacagctttagacaccactgatgcagatgtagccatatactgcagggacaagaaatgggaaatgactctcaaggaagcagtggctaggagagaagcagtggaggagatatgcatatccgacgactcttcagtgacagaacctgatgcagagctggtgagggtgcatccgaagagttctttggctggaaggaagggctacagcacaagcgatggcaaaactttctcatatttggaagggaccaagtttcaccaggcggccaaggatatagcagaaattaatgccatgtggcccgttgcaacggaggccaatgagcaggtatgcatgtatatcctcggagaaagcatgagcagtattaggtcgaaatgccccgtcgaagagtcggaagcctccacaccacctagcacgctgccttgcttgtgcatccatgccatgactccagaaagagtacagcgcctaaaagcctcacgtccagaacaaattactgtgtgctcatcctttccattgccgaagtatagaatcactggtgtgcagaagatccaatgctcccagcctatattgttctcaccgaaagtgcctgcgtatattcatccaaggaagtatctcgtggaaacaccaccggtagacgagactccggagccatcggcagagaaccaatccacagaggggacacctgaacaaccaccacttataaccgaggatgagaccaggactagaacgcctgagccgatcatcatcgaagaggaagaagaggatagcataagtttgctgtcagatggcccgacccaccaggtgctgcaagtcgaggcagacattcacgggccgccctctgtatctagctcatcctggtccattcctcatgcatccgactttgatgtggacagtttatccatacttgacaccctggagggagctagcgtgaccagcggggcaacgtcagccgagactaactcttacttcgcaaagagtatggagtttctggcgcgaccggtgcctgcgcctcgaacagtattcaggaaccctccacatcccgctccgcgcacaagaacaccgtcacttgcacccagcagggcctgctcgagaaccagcctagtttccaccccgccaggcgtgaatagggtgatcactagagaggagctcgaggcgcttaccccgtcacgcactcctagcaggtcggtctcgagaaccagcctggtctccaacccgccaggcgtaaatagggtgattacaagagaggagtttgaggcgttcgtagcacaacaacaatgacggtttgatgcgggtgcatacatcttttcctccgacaccggtcaagggcatttacaacaaaaatcagtaaggcaaacggtgctatccgaagtggtgttggagaggaccgaattggagatttcgtatgccccgcgcctcgaccaagaaaaagaagaattactacgcaagaaattacagttaaatcccacacctgctaacagaagcagataccagtccaggaaggtggagaacatgaaagccataacagctagacgtattctgcaaggcctagggcattatttgaaggcagaaggaaaagtggagtgctaccgaaccctgcatcctgttcctttgtattcatctagtgtgaaccgtgccttttcaagccccaaggtcgcagtggaagcctgtaacgccatgttgaaagagaactttccgactgtggcttcttactgtattattccagagtacgatgcctatttggacatggttgacggagcttcatgctgcttagacactgccagtttttgccctgcaaagctgcgcagctttccaaagaaacactcctatttggaacccacaatacgatcggcagtgccttcagcgatccagaacacgctccagaacgtcctggcagctgccacaaaaagaaattgcaatgtcacgcaaatgagagaattgcccgtattggattcggcggcctttaatgtggaatgcttcaagaaatatgcgtgtaataatgaatattgggaaacgtttaaagaaaaccccatcaggcttactgaagaaaacgtggtaaattacattaccaaattaaaaggaccaaaagctgctgctctttttgcgaagacacataatttgaatatgttgcaggacataccaatggacaggtttgtaatggacttaaagagagacgtgaaagtgactccaggaacaaaacatactgaagaacggcccaaggtacaggtgatccaggctgccgatccgctagcaacagcgtatctgtgcggaatccaccgagagctggttaggagattaaatgcggtcctgcttccgaacattcatacactgtttgatatgtcggctgaagactttgacgctattatagccgagcacttccagcctggggattgtgttctggaaactgacatcgcgtcgtttgataaaagtgaggacgacgccatggctctgaccgcgttaatgattctggaagacttaggtgtggacgcagagctgttgacgctgattgaggcggctttcggcgaaatttcatcaatacatttgcccactaaaactaaatttaaattcggagccatgatgaaatctggaatgttcctcacactgtttgtgaacacagtcattaacattgtaatcgcaagcagagtgttgagagaacggctaaccggatcaccatgtgcagcattcattggagatgacaatatcgtgaaaggagtcaaatcggacaaattaatggcagacaggtgcgccacctggttgaatatggaagtcaagattatagatgctgtggtgggcgagaaagcgccttatttctgtggagggtttattttgtgtgactccgtgaccggcacagcgtgccgtgtggcagaccccctaaaaaggctgtttaagcttggcaaacctctggcagcagacgatgaacatgatgatgacaggagaagggcattgcatgaagagtcaacacgctggaaccgagtgggtattctttcagagctgtgcaaggcagtagaatcaaggtatgaaaccgtaggaacttccatcatagttatggccatgactactctagctagcagtgttaaatcattcagctacctgagaggggcccctataactctctacggctaacctgaatggactacgactatcacgcccaaacatttacagccgcggtgtcaaaaaccgcgtggacgtggttaacatccctgctgggaggatcagccgtaattattataattggcttggtgctggctactattgtggccatgtacgtgctgaccaaccagaaacataattgaatacagcagcaattggcaagctgcttacatagaactcgcggcgattggcatgccgccttaaaatttttattttattttttcttttcttttccgaatcggattttgtttttaatatttcaaaaaaaaaaaaaaaaaaaaaaaaaaaaaaaaaaaaaaaaaaaaaaaaaaaaaaaaaaaaaaaaaaaaaaaaaaaaaaaatacgtagtttaaac

SEQ ID NO: 9 - DNA, 7926 bp, Artificial Sequence
  Description of Artificial Sequence: Synthetic polynucleotide
taatacgactcactataggataggcggcgcatgagagaagcccagaccaattacctacccaaaatggagaaagttcacgttgacatcgaggaagacagcccattcctcagagctttgcagcggagcttcccgcagtttgaggtagaagccaagcaggtcactgataatgaccatgctaatgccagagcgttttcgcatctggcttcaaaactgatcgaaacggaggtggacccatccgacacgatccttgacattggaagtgcgcccgcccgcagaatgtattctaagcacaagtatcattgtatctgtccgatgagatgtgcggaagatccggacagattgtataagtatgcaactaagctgaagaaaaactgtaaggaaataactgataaggaattggacaagaaaatgaaggagctcgccgccgtcatgagcgaccctgacctggaaactgagactatgtgcctccacgacgacgagtcgtgtcgctacgaagggcaagtcgctgtttaccaggatgtatacgcggttgacggaccgacaagtctctatcaccaagccaataagggagttagagtcgcctactggataggctttgacaccaccccttttatgtttaagaacttggctggagcatatccatcatactctaccaactgggccgacgaaaccgtgttaacggctcgtaacataggcctatgcagctctgacgttatggagcggtcacgtagagggatgtccattcttagaaagaagtatttgaaaccatccaacaatgttctattctctgttggctcgaccatctaccacgagaagagggacttactgaggagctggcacctgccgtctgtatttcacttacgtggcaagcaaaattacacatgtcggtgtgagactatagttagttgcgacgggtacgtcgttaaaagaatagctatcagtccaggcctgtatgggaagccttcaggctatgctgctacgatgcaccgcgagggattcttgtgctgcaaagtgacagacacattgaacggggagagggtctcttttcccgtgtgcacgtatgtgccagctacattgtgtgaccaaatgactggcatactggcaacagatgtcagtgcggacgacgcgcaaaaactgctggttgggctcaaccagcgtatagtcgtcaacggtcgcacccagagaaacaccaataccatgaaaaattaccttttgcccgtagtggcccaggcatttgctaggtgggcaaaggaatataaggaagatcaagaagatgaaaggccactaggactacgagatagacagttagtcatggggtgttgttgggcttttagaaggcacaagataacatctatttataagcgcccggatacccaaaccatcatcaaagtgaacagcgatttccactcattcgtgctgcccaggataggcagtaacacattggagatcgggctgagaacaagaatcaggaaaatgttagaggagcacaaggagccgtcacctctcattaccgccgaggacgtacaagaagctaagtgcgcagccgatgaggctaaggaggtgcgtgaagccgaggagttgcgcgcagctctaccacctttggcagctgatgttgaggagcccactctggaagccgatgtcgacttgatgttacaagaggctggggccggctcagtggagacacctcgtggcttgataaaggttaccagctacgatggcgaggacaagatcggctcttacgctgtgctttctccgcaggctgtactcaagagtgaaaaattatcttgcatccaccctctcgctgaacaagtcatagtgataacacactctggccgaaaagggcgttatgccgtggaaccataccatggtaaagtagtggtgccagagggacatgcaatacccgtccaggactttcaagctctgagtgaaagtgccaccattgtgtacaacgaacgtgagttcgtaaacaggtacctgcaccatattgccacacatggaggagcgctgaacactgatgaagaatattacaaaactgtcaagcccagcgagcacgacggcgaatacctgtacgacatcgacaggaaacagtgcgtcaagaaagaactagtcactgggctagggctcacaggcgagctggtggatcctcccttccatgaattcgcctacgagagtctgagaacacgaccagccgctccttaccaagtaccaaccataggggtgtatggcgtgccaggatcaggcaagtctggcatcattaaaagcgcagtcaccaaaaaagatctagtggtgagcgccaagaaagaaaactgtgcagaaattataagggacgtcaagaaaatgaaagggctggacgtcaatgccagaactgtggactcagtgctcttgaatggatgcaaacaccccgtagagaccctgtatattgacgaagcttttgcttgtcatgcaggtactctcagagcgctcatagccattataagacctaaaaaggcagtgctctgcggggatcccaaacagtgcggtttttttaacatgatgtgcctgaaagtgcattttaaccacgagatttgcacacaagtcttccacaaaagcatctctcgccgttgcactaaatctgtgacttcggtcgtctcaaccttgttttacgacaaaaaaatgagaacgacgaatccgaaagagactaagattgtgattgacactaccggcagtaccaaacctaagcaggacgatctcattctcacttgtttcagagggtgggtgaagcagttgcaaatagattacaaaggcaacgaaataatgacggcagctgcctctcaagggctgacccgtaaaggtgtgtatgccgttcggtacaaggtgaatgaaaatcctctgtacgcacccacctcagaacatgtgaacgtcctactgacccgcacggaggaccgcatcgtgtggaaaacactagccggcgacccatggataaaaacactgactgccaagtaccctgggaatttcactgccacgatagaggagtggcaagcagagcatgatgccatcatgaggcacatcttggagagaccggaccctaccgacgtcttccagaataaggcaaacgtgtgttgggccaaggctttagtgccggtgctgaagaccgctggcatagacatgaccactgaacaatggaacactgtggattattttgaaacggacaaagctcactcagcagagatagtattgaaccaactatgcgtgaggttctttggactcgatctggactccggtctattttctgcacccactgttccgttatccattaggaataatcactgggataactccccgtcgcctaacatgtacgggctgaataaagaagtggtccgtcagctctctcgcaggtacccacaactgcctcgggcagttgccactggaagagtctatgacatgaacactggtacactgcgcaattatgatccgcgcataaacctagtacctgtaaacagaagactgcctcatgctttagtcctccaccataatgaacacccacagagtgacttttcttcattcgtcagcaaattgaagggcagaactgtcctggtggtcggggaaaagttgtccgtcccaggcaaaatggttgactggttgtcagaccggcctgaggctaccttcagagctcggctggatttaggcatcccaggtgatgtgcccaaatatgacataatatttgttaatgtgaggaccccatataaataccatcactatcagcagtgtgaagaccatgccattaagcttagcatgttgaccaagaaagcttgtctgcatctgaatcccggcggaacctgtgtcagcataggttatggttacgctgacagggccagcgaaagcatcattggtgctatagcgcggcagttcaagttttcccgggtatgcaaaccgaaatcctcacttgaagagacggaagttctgtttgtattcattgggtacgatcgcaaggcccgtacgcacaatccttacaagctttcatcaaccttgaccaacatttatacaggttccagactccacgaagccggatgtgcaccctcatatcatgtggtgcgaggggatattgccacggccaccgaaggagtgattataaatgctgctaacagcaaaggacaacctggcggaggggtgtgcggagcgctgtataagaaattcccggaaagcttcgatttacagccgatcgaagtaggaaaagcgcgactggtcaaaggtgcagctaaacatatcattcatgccgtaggaccaaacttcaacaaagtttcggaggttgaaggtgacaaacagttggcagaggcttatgagtccatcgctaagattgtcaacgataacaattacaagtcagtagcgattccactgttgtccaccggcatcttttccgggaacaaagatcgactaacccaatcattgaaccatttgctgacagctttagacaccactgatgcagatgtagccatatactgcagggacaagaaatgggaaatgactctcaaggaagcagtggctaggagagaagcagtggaggagatatgcatatccgacgactcttcagtgacagaacctgatgcagagctggtgagggtgcatccgaagagttctttggctggaaggaagggctacagcacaagcgatggcaaaactttctcatatttggaagggaccaagtttcaccaggcggccaaggatatagcagaaattaatgccatgtggcccgttgcaacggaggccaatgagcaggtatgcatgtatatcctcggagaaagcatgagcagtattaggtcgaaatgccccgtcgaagagtcggaagcctccacaccacctagcacgctgccttgcttgtgcatccatgccatgactccagaaagagtacagcgcctaaaagcctcacgtccagaacaaattactgtgtgctcatcctttccattgccgaagtatagaatcactggtgtgcagaagatccaatgctcccagcctatattgttctcaccgaaagtgcctgcgtatattcatccaaggaagtatctcgtggaaacaccaccggtagacgagactccggagccatcggcagagaaccaatccacagaggggacacctgaacaaccaccacttataaccgaggatgagaccaggactagaacgcctgagccgatcatcatcgaagaggaagaagaggatagcataagtttgctgtcagatggcccgacccaccaggtgctgcaagtcgaggcagacattcacgggccgccctctgtatctagctcatcctggtccattcctcatgcatccgactttgatgtggacagtttatccatacttgacaccctggagggagctagcgtgaccagcggggcaacgtcagccgagactaactcttacttcgcaaagagtatggagtttctggcgcgaccggtgcctgcgcctcgaacagtattcaggaaccctccacatcccgctccgcgcacaagaacaccgtcacttgcacccagcagggcctgctcgagaaccagcctagtttccaccccgccaggcgtgaatagggtgatcactagagaggagctcgaggcgcttaccccgtcacgcactcctagcaggtcggtctcgagaaccagcctggtctccaacccgccaggcgtaaatagggtgattacaagagaggagtttgaggcgttcgtagcacaacaacaatgacggtttgatgcgggtgcatacatcttttcctccgacaccggtcaagggcatttacaacaaaaatcagtaaggcaaacggtgctatccgaagtggtgttggagaggaccgaattggagatttcgtatgccccgcgcctcgaccaagaaaaagaagaattactacgcaagaaattacagttaaatcccacacctgctaacagaagcagataccagtccaggaaggtggagaacatgaaagccataacagctagacgtattctgcaaggcctagggcattatttgaaggcagaaggaaaagtggagtgctaccgaaccctgcatcctgttcctttgtattcatctagtgtgaaccgtgccttttcaagccccaaggtcgcagtggaagcctgtaacgccatgttgaaagagaactttccgactgtggcttcttactgtattattccagagtacgatgcctatttggacatggttgacggagcttcatgctgcttagacactgccagtttttgccctgcaaagctgcgcagctttccaaagaaacactcctatttggaacccacaatacgatcggcagtgccttcagcgatccagaacacgctccagaacgtcctggcagctgccacaaaaagaaattgcaatgtcacgcaaatgagagaattgcccgtattggattcggcggcctttaatgtggaatgcttcaagaaatatgcgtgtaataatgaatattgggaaacgtttaaagaaaaccccatcaggcttactgaagaaaacgtggtaaattacattaccaaattaaaaggaccaaaagctgctgctctttttgcgaagacacataatttgaatatgttgcaggacataccaatggacaggtttgtaatggacttaaagagagacgtgaaagtgactccaggaacaaaacatactgaagaacggcccaaggtacaggtgatccaggctgccgatccgctagcaacagcgtatctgtgcggaatccaccgagagctggttaggagattaaatgcggtcctgcttccgaacattcatacactgtttgatatgtcggctgaagactttgacgctattatagccgagcacttccagcctggggattgtgttctggaaactgacatcgcgtcgtttgataaaagtgaggacgacgccatggctctgaccgcgttaatgattctggaagacttaggtgtggacgcagagctgttgacgctgattgaggcggctttcggcgaaatttcatcaatacatttgcccactaaaactaaatttaaattcggagccatgatgaaatctggaatgttcctcacactgtttgtgaacacagtcattaacattgtaatcgcaagcagagtgttgagagaacggctaaccggatcaccatgtgcagcattcattggagatgacaatatcgtgaaaggagtcaaatcggacaaattaatggcagacaggtgcgccacctggttgaatatggaagtcaagattatagatgctgtggtgggcgagaaagcgccttatttctgtggagggtttattttgtgtgactccgtgaccggcacagcgtgccgtgtggcagaccccctaaaaaggctgtttaagcttggcaaacctctggcagcagacgatgaacatgatgatgacaggagaagggcattgcatgaagagtcaacacgctggaaccgagtgggtattctttcagagctgtgcaaggcagtagaatcaaggtatgaaaccgtaggaacttccatcatagttatggccatgactactctagctagcagtgttaaatcattcagctacctgagaggggcccctataactctctacggctaacctgaatggactacgactatcacgcccaaacatttacagccgcggtgtcaaaaaccgcgtggacgtggttaacatccctgctgggaggatcagccgtaattattataattggcttggtgctggctactattgtggccatgtacgtgctgaccaaccagaaacataattgaatacagcagcaattggcaagctgcttacatagaactcgcggcgattggcatgccgccttaaaatttttattttatttttcttttcttttccgaatcggattttgtttttaatatttcaaaaaaaaaaaaaaaaaaaaaaaaaaaaaaaaaaaaaaaaaaaaaaaaaaaaaaaaaaaaaaaaaaaaaaaaaaaaaaaatacgtagtttaaac

SEQ ID NO: 10 - DNA, 36519 bp, Artificial Sequence
  Description of Artificial Sequence: Synthetic polynucleotide
ccatcttcaataatatacctcaaactttttgtgcgcgttaatatgcaaatgaggcgtttgaatttggggaggaagggcggtgattggtcgagggatgagcgaccgttaggggcggggcgagtgacgttttgatgacgtggttgcgaggaggagccagtttgcaagttctcgtgggaaaagtgacgtcaaacgaggtgtggtttgaacacggaaatactcaattttcccgcgctctctgacaggaaatgaggtgtttctgggcggatgcaagtgaaaacgggccattttcgcgcgaaaactgaatgaggaagtgaaaatctgagtaatttcgcgtttatggcagggaggagtatttgccgagggccgagtagactttgaccgattacgtgggggtttcgattaccgtgtttttcacctaaatttccgcgtacggtgtcaaagtccggtgtttttacgtaggtgtcagctgatcgccagggtatttaaacctgcgctctccagtcaagaggccactcttgagtgccagcgagaagagttttctcctccgcgccgcgagtcagatctacactttgaaagatgaggcacctgagagacctgcccgatgagaaaatcatcatcgcttccgggaacgagattctggaactggtggtaaatgccatgatgggcgacgaccctccggagccccccaccccatttgagacaccttcgctgcacgatttgtatgatctggaggtggatgtgcccgaggacgatcccaatgaggaggcggtaaatgatttttttagcgatgccgcgctgctagctgccgaggaggcttcgagctctagctcagacagcgactcttcactgcatacccctagacccggcagaggtgagaaaaagatccccgagcttaaaggggaagagatggacttgcgctgctatgaggaatgcttgcccccgagcgatgatgaggacgagcaggcgatccagaacgcagcgagccagggagtgcaagccgccagcgagagctttgcgctggactgcccgcctctgcccggacacggctgtaagtcttgtgaatttcatcgcatgaatactggagataaagctgtgttgtgtgcactttgctatatgagagcttacaaccattgtgtttacagtaagtgtgattaagttgaactttagagggaggcagagagcagggtgactgggcgatgactggtttatttatgtatatatgttctttatataggtcccgtctctgacgcagatgatgagacccccactacaaagtccacttcgtcacccccagaaattggcacatctccacctgagaatattgttagaccagttcctgttagagccactgggaggagagcagctgtggaatgtttggatgacttgctacagggtggggttgaacctttggacttgtgtacccggaaacgccccaggcactaagtgccacacatgtgtgtttacttgaggtgatgtcagtatttatagggtgtggagtgcaataaaaaatgtgttgactttaagtgcgtggtttatgactcaggggtggggactgtgagtatataagcaggtgcagacctgtgtggttagctcagagcggcatggagatttggacggtcttggaagactttcacaagactagacagctgctagagaacgcctcgaacggagtctcttacctgtggagattctgcttcggtggcgacctagctaggctagtctacagggccaaacaggattatagtgaacaatttgaggttattttgagagagtgttctggtctttttgacgctcttaacttgggccatcagtctcactttaaccagaggatttcgagagcccttgattttactactcctggcagaaccactgcagcagtagccttttttgcttttattcttgacaaatggagtcaagaaacccatttcagcagggattaccagctggatttcttagcagtagctttgtggagaacatggaagtgccagcgcctgaatgcaatctccggctacttgccggtacagccgctagacactctgaggatcctgaatctccaggagagtcccagggcacgccaacgtcgccagcagcagcagcaggaggaggatcaagaagagaacccgagagccggcctggaccctccggcggaggaggaggagtagctgacctgtttcctgaactgcgccgggtgctgactaggtcttcgagtggtcgggagagggggattaagcgggagaggcatgatgagactaatcacagaactgaactgactgtgggtctgatgagtcgcaagcgcccagaaacagtgtggtggcatgaggtgcagtcgactggcacagatgaggtgtcggtgatgcatgagaggttttctctagaacaagtcaagacttgttggttagagcctgaggatgattgggaggtagccatcaggaattatgccaagctggctctgaggccagacaagaagtacaagattactaagctgataaatatcagaaatgcctgctacatctcagggaatggggctgaagtggagatctgtctccaggaaagggtggctttcagatgctgcatgatgaatatgtacccgggagtggtgggcatggatggggttacctttatgaacatgaggttcaggggagatgggtataatggcacggtctttatggccaataccaagctgacagtccatggctgctccttctttgggtttaataacacctgcatcgaggcctggggtcaggtcggtgtgaggggctgcagtttttcagccaactggatgggggtcgtgggcaggaccaagagtatgctgtccgtgaagaaatgcttgtttgagaggtgccacctgggggtgatgagcgagggcgaagccagaatccgccactgcgcctctaccgagacgggctgctttgtgctgtgcaagggcaatgctaagatcaagcataatatgatctgtggagcctcggacgagcgcggctaccagatgctgacctgcgccggcgggaacagccatatgctggccaccgtacatgtggcttcccatgctcgcaagccctggcccgagttcgagcacaatgtcatgaccaggtgcaatatgcatctggggtcccgccgaggcatgttcatgccctaccagtgcaacctgaattatgtgaaggtgctgctggagcccgatgccatgtccagagtgagcctgacgggggtgtttgacatgaatgtggaggtgtggaagattctgagatatgatgaatccaagaccaggtgccgagcctgcgagtgcggagggaagcatgccaggttccagcccgtgtgtgtggatgtgacggaggacctgcgacccgatcatttggtgttgccctgcaccgggacggagttcggttccagcggggaagaatctgactagagtgagtagtgttctggggcgggggaggacctgcatgagggccagaataactgaaatctgtgcttttctgtgtgttgcagcagcatgagcggaagcggctcctttgagggaggggtattcagcccttatctgacggggcgtctcccctcctgggcgggagtgcgtcagaatgtgatgggatccacggtggacggccggcccgtgcagcccgcgaactcttcaaccctgacctatgcaaccctgagctcttcgtcgttggacgcagctgccgccgcagctgctgcatctgccgccagcgccgtgcgcggaatggccatgggcgccggctactacggcactctggtggccaactcgagttccaccaataatcccgccagcctgaacgaggagaagctgttgctgctgatggcccagctcgaggccttgacccagcgcctgggcgagctgacccagcaggtggctcagctgcaggagcagacgcgggccgcggttgccacggtgaaatccaaataaaaaatgaatcaataaataaacggagacggttgttgattttaacacagagtctgaatctttatttgatttttcgcgcgcggtaggccctggaccaccggtctcgatcattgagcacccggtggatcttttccaggacccggtagaggtgggcttggatgttgaggtacatgggcatgagcccgtcccgggggtggaggtagctccattgcagggcctcgtgctcgggggtggtgttgtaaatcacccagtcatagcaggggcgcagggcatggtgttgcacaatatctttgaggaggagactgatggccacgggcagccctttggtgtaggtgtttacaaatctgttgagctgggagggatgcatgcggggggagatgaggtgcatcttggcctggatcttgagattggcgatgttaccgcccagatcccgcctggggttcatgttgtgcaggaccaccagcacggtgtatccggtgcacttggggaatttatcatgcaacttggaagggaaggcgtgaaagaatttggcgacgcctttgtgcccgcccaggttttccatgcactcatccatgatgatggcgatgggcccgtgggcggcggcctgggcaaagacgtttcgggggtcggacacatcatagttgtggtcctgggtgaggtcatcataggccattttaatgaatttggggcggagggtgccggactgggggacaaaggtaccctcgatcccgggggcgtagttcccctcacagatctgcatctcccaggctttgagctcggagggggggatcatgtccacctgcggggcgataaagaacacggtttccggggcgggggagatgagctgggccgaaagcaagttccggagcagctgggacttgccgcagccggtggggccgtagatgaccccgatgaccggctgcaggtggtagttgagggagagacagctgccgtcctcccggaggaggggggccacctcgttcatcatctcgcgcacgtgcatgttctcgcgcaccagttccgccaggaggcgctctccccccagggataggagctcctggagcgaggcgaagtttttcagcggcttgagtccgtcggccatgggcattttggagagggtttgttgcaagagttccaggcggtcccagagctcggtgatgtgctctacggcatctcgatccagcagacctcctcgtttcgcgggttgggacggctgcgggagtagggcaccagacgatgggcgtccagcgcagccagggtccggtccttccagggtcgcagcgtccgcgtcagggtggtctccgtcacggtgaaggggtgcgcgccgggctgggcgcttgcgagggtgcgcttcaggctcatccggctggtcgaaaaccgctcccgatcggcgccctgcgcgtcggccaggtagcaattgaccatgagttcgtagttgagcgcctcggccgcgtggcctttggcgcggagcttacctttggaagtctgcccgcaggcgggacagaggagggacttgagggcgtagagcttgggggcgaggaagacggactcgggggcgtaggcgtccgcgccgcagtgggcgcagacggtctcgcactccacgagccaggtgaggtcgggctggtcggggtcaaaaaccagtttcccgccgttctttttgatgcgtttcttacctttggtctccatgagctcgtgtccccgctgggtgacaaagaggctgtccgtgtccccgtagaccgactttatgggccggtcctcgagcggtgtgccgcggtcctcctcgtagaggaaccccgcccactccgagacgaaagcccgggtccaggccagcacgaaggaggccacgtgggacgggtagcggtcgttgtccaccagcgggtccaccttttccagggtatgcaaacacatgtccccctcgtccacatccaggaaggtgattggcttgtaagtgtaggccacgtgaccgggggtcccggccgggggggtataaaagggtgcgggtccctgctcgtcctcactgtcttccggatcgctgtccaggagcgccagctgttggggtaggtattccctctcgaaggcgggcatgacctcggcactcaggttgtcagtttctagaaacgaggaggatttgatattgacggtgccggcggagatgcctttcaagagcccctcgtccatctggtcagaaaagacgatctttttgttgtcgagcttggtggcgaaggagccgtagagggcgttggagaggagcttggcgatggagcgcatggtctggtttttttccttgtcggcgcgctccttggcggcgatgttgagctgcacgtactcgcgcgccacgcacttccattcggggaagacggtggtcagctcgtcgggcacgattctgacctgccagccccgattatgcagggtgatgaggtccacactggtggccacctcgccgcgcaggggctcattagtccagcagaggcgtccgcccttgcgcgagcagaaggggggcagggggtccagcatgacctcgtcgggggggtcggcatcgatggtgaagatgccgggcaggaggtcggggtcaaagtagctgatggaagtggccagatcgtccagggcagcttgccattcgcgcacggccagcgcgcgctcgtagggactgaggggcgtgccccagggcatgggatgggtaagcgcggaggcgtacatgccgcagatgtcgtagacgtagaggggctcctcgaggatgccgatgtaggtggggtagcagcgccccccgcggatgctggcgcgcacgtagtcatacagctcgtgcgagggggcgaggagccccgggcccaggttggtgcgactgggcttttcggcgcggtagacgatctggcggaaaatggcatgcgagttggaggagatggtgggcctttggaagatgttgaagtgggcgtggggcagtccgaccgagtcgcggatgaagtgggcgtaggagtcttgcagcttggcgacgagctcggcggtgactaggacgtccagagcgcagtagtcgagggtctcctggatgatgtcatacttgagctgtcccttttgtttccacagctcgcggttgagaaggaactcttcgcggtccttccagtactcttcgagggggaacccgtcctgatctgcacggtaagagcctagcatgtagaactggttgacggccttgtaggcgcagcagcccttctccacggggagggcgtaggcctgggcggccttgcgcagggaggtgtgcgtgagggcgaaagtgtccctgaccatgaccttgaggaactggtgcttgaagtcgatatcgtcgcagcccccctgctcccagagctggaagtccgtgcgcttcttgtaggcggggttgggcaaagcgaaagtaacatcgttgaagaggatcttgcccgcgcggggcataaagttgcgagtgatgcggaaaggttggggcacctcggcccggttgttgatgacctgggcggcgagcacgatctcgtcgaagccgttgatgttgtggcccacgatgtagagttccacgaatcgcggacggcccttgacgtggggcagtttcttgagctcctcgtaggtgagctcgtcggggtcgctgagcccgtgctgctcgagcgcccagtcggcgagatgggggttggcgcggaggaaggaagtccagagatccacggccagggcggtttgcagacggtcccggtactgacggaactgctgcccgacggccattttttcgggggtgacgcagtagaaggtgcgggggtccccgtgccagcgatcccatttgagctggagggcgagatcgagggcgagctcgacgagccggtcgtccccggagagtttcatgaccagcatgaaggggacgagctgcttgccgaaggaccccatccaggtgtaggtttccacatcgtaggtgaggaagagcctttcggtgcgaggatgcgagccgatggggaagaactggatctcctgccaccaattggaggaatggctgttgatgtgatggaagtagaaatgccgacggcgcgccgaacactcgtgcttgtgtttatacaagcggccacagtgctcgcaacgctgcacgggatgcacgtgctgcacgagctgtacctgagttcctttgacgaggaatttcagtgggaagtggagtcgtggcgcctgcatctcgtgctgtactacgtcgtggtggtcggcctggccctcttctgcctcgatggtggtcatgctgacgagcccgcgcgggaggcaggtccagacctcggcgcgagcgggtcggagagcgaggacgagggcgcgcaggccggagctgtccagggtcctgagacgctgcggagtcaggtcagtgggcagcggcggcgcgcggttgacttgcaggagtttttccagggcgcgcgggaggtccagatggtacttgatctccaccgcgccattggtggcgacgtcgatggcttgcagggtcccgtgcccctggggtgtgaccaccgtcccccgtttcttcttgggcggctggggcgacgggggcggtgcctcttccatggttagaagcggcggcgaggacgcgcgccgggcggcaggggcggctcggggcccggaggcaggggcggcaggggcacgtcggcgccgcgcgcgggtaggttctggtactgcgcccggagaagactggcgtgagcgacgacgcgacggttgacgtcctggatctgacgcctctgggtgaaggccacgggacccgtgagtttgaacctgaaagagagttcgacagaatcaatctcggtatcgttgacggcggcctgccgcaggatctcttgcacgtcgcccgagttgtcctggtaggcgatctcggtcatgaactgctcgatctcctcctcttgaaggtctccgcggccggcgcgctccacggtggccgcgaggtcgttggagatgcggcccatgagctgcgagaaggcgttcatgcccgcctcgttccagacgcggctgtagaccacgacgccctcgggatcgcgggcgcgcatgaccacctgggcgaggttgagctccacgtggcgcgtgaagaccgcgtagttgcagaggcgctggtagaggtagttgagcgtggtggcgatgtgctcggtgacgaagaaatacatgatccagcggcggagcggcatctcgctgacgtcgcccagcgcctccaaacgttccatggcctcgtaaaagtccacggcgaagttgaaaaactgggagttgcgcgccgagacggtcaactcctcctccagaagacggatgagctcggcgatggtggcgcgcacctcgcgctcgaaggcccccgggagttcctccacttcctcttcttcctcctccactaacatctcttctacttcctcctcaggcggcagtggtggcgggggagggggcctgcgtcgccggcggcgcacgggcagacggtcgatgaagcgctcgatggtctcgccgcgccggcgtcgcatggtctcggtgacggcgcgcccgtcctcgcggggccgcagcgtgaagacgccgccgcgcatctccaggtggccgggggggtccccgttgggcagggagagggcgctgacgatgcatcttatcaattgccccgtagggactccgcgcaaggacctgagcgtctcgagatccacgggatctgaaaaccgctgaacgaaggcttcgagccagtcgcagtcgcaaggtaggctgagcacggtttcttctggcgggtcatgttggttgggagcggggcgggcgatgctgctggtgatgaagttgaaataggcggttctgagacggcggatggtggcgaggagcaccaggtctttgggcccggcttgctggatgcgcagacggtcggccatgccccaggcgtggtcctgacacctggccaggtccttgtagtagtcctgcatgagccgctccacgggcacctcctcctcgcccgcgcggccgtgcatgcgcgtgagcccgaagccgcgctggggctggacgagcgccaggtcggcgacgacgcgctcggcgaggatggcttgctggatctgggtgagggtggtctggaagtcatcaaagtcgacgaagcggtggtaggctccggtgttgatggtgtaggagcagttggccatgacggaccagttgacggtctggtggcccggacgcacgagctcgtggtacttgaggcgcgagtaggcgcgcgtgtcgaagatgtagtcgttgcaggtgcgcaccaggtactggtagccgatgaggaagtgcggcggcggctggcggtagagcggccatcgctcggtggcgggggcgccgggcgcgaggtcctcgagcatggtgcggtggtagccgtagatgtacctggacatccaggtgatgccggcggcggtggtggaggcgcgcgggaactcgcggacgcggttccagatgttgcgcagcggcaggaagtagttcatggtgggcacggtctggcccgtgaggcgcgcgcagtcgtggatgctctatacgggcaaaaacgaaagcggtcagcggctcgactccgtggcctggaggctaagcgaacgggttgggctgcgcgtgtaccccggttcgaatctcgaatcaggctggagccgcagctaacgtggtattggcactcccgtctcgacccaagcctgcaccaaccctccaggatacggaggcgggtcgttttgcaacttttttttggaggccggatgagactagtaagcgcggaaagcggccgaccgcgatggctcgctgccgtagtctggagaagaatcgccagggttgcgttgcggtgtgccccggttcgaggccggccggattccgcggctaacgagggcgtggctgccccgtcgtttccaagaccccatagccagccgacttctccagttacggagcgagcccctcttttgttttgtttgtttttgccagatgcatcccgtactgcggcagatgcgcccccaccaccctccaccgcaacaacagccccctccacagccggcgcttctgcccccgccccagcagcaacttccagccacgaccgccgcggccgccgtgagcggggctggacagagttatgatcaccagctggccttggaagagggcgaggggctggcgcgcctgggggcgtcgtcgccggagcggcacccgcgcgtgcagatgaaaagggacgctcgcgaggcctacgtgcccaagcagaacctgttcagagacaggagcggcgaggagcccgaggagatgcgcgcggcccggttccacgcggggcgggagctgcggcgcggcctggaccgaaagagggtgctgagggacgaggatttcgaggcggacgagctgacggggatcagccccgcgcgcgcgcacgtggccgcggccaacctggtcacggcgtacgagcagaccgtgaaggaggagagcaacttccaaaaatccttcaacaaccacgtgcgcaccctgatcgcgcgcgaggaggtgaccctgggcctgatgcacctgtgggacctgctggaggccatcgtgcagaaccccaccagcaagccgctgacggcgcagctgttcctggtggtgcagcatagtcgggacaacgaagcgttcagggaggcgctgctgaatatcaccgagcccgagggccgctggctcctggacctggtgaacattctgcagagcatcgtggtgcaggagcgcgggctgccgctgtccgagaagctggcggccatcaacttctcggtgctgagtttgggcaagtactacgctaggaagatctacaagaccccgtacgtgcccatagacaaggaggtgaagatcgacgggttttacatgcgcatgaccctgaaagtgctgaccctgagcgacgatctgggggtgtaccgcaacgacaggatgcaccgtgcggtgagcgccagcaggcggcgcgagctgagcgaccaggagctgatgcatagtctgcagcgggccctgaccggggccgggaccgagggggagagctactttgacatgggcgcggacctgcactggcagcccagccgccgggccttggaggcggcggcaggaccctacgtagaagaggtggacgatgaggtggacgaggagggcgagtacctggaagactgatggcgcgaccgtatttttgctagatgcaacaacaacagccacctcctgatcccgcgatgcgggcggcgctgcagagccagccgtccggcattaactcctcggacgattggacccaggccatgcaacgcatcatggcgctgacgacccgcaaccccgaagcctttagacagcagccccaggccaaccggctctcggccatcctggaggccgtggtgccctcgcgctccaaccccacgcacgagaaggtcctggccatcgtgaacgcgctggtggagaacaaggccatccgcggcgacgaggccggcctggtgtacaacgcgctgctggagcgcgtggcccgctacaacagcaccaacgtgcagaccaacctggaccgcatggtgaccgacgtgcgcgaggccgtggcccagcgcgagcggttccaccgcgagtccaacctgggatccatggtggcgctgaacgccttcctcagcacccagcccgccaacgtgccccggggccaggaggactacaccaacttcatcagcgccctgcgcctgatggtgaccgaggtgccccagagcgaggtgtaccagtccgggccggactacttcttccagaccagtcgccagggcttgcagaccgtgaacctgagccaggctttcaagaacttgcagggcctgtggggcgtgcaggccccggtcggggaccgcgcgacggtgtcgagcctgctgacgccgaactcgcgcctgctgctgctgctggtggcccccttcacggacagcggcagcatcaaccgcaactcgtacctgggctacctgattaacctgtaccgcgaggccatcggccaggcgcacgtggacgagcagacctaccaggagatcacccacgtgagccgcgccctgggccaggacgacccgggcaacctggaagccaccctgaactttttgctgaccaaccggtcgcagaagatcccgccccagtacgcgctcagcaccgaggaggagcgcatcctgcgttacgtgcagcagagcgtgggcctgttcctgatgcaggagggggccacccccagcgccgcgctcgacatgaccgcgcgcaacatggagcccagcatgtacgccagcaaccgcccgttcatcaataaactgatggactacttgcatcgggcggccgccatgaactctgactatttcaccaacgccatcctgaatccccactggctcccgccgccggggttctacacgggcgagtacgacatgcccgaccccaatgacgggttcctgtgggacgatgtggacagcagcgtgttctccccccgaccgggtgctaacgagcgccccttgtggaagaaggaaggcagcgaccgacgcccgtcctcggcgctgtccggccgcgagggtgctgccgcggcggtgcccgaggccgccagtcctttcccgagcttgcccttctcgctgaacagtatccgcagcagcgagctgggcaggatcacgcgcccgcgcttgctgggcgaagaggagtacttgaatgactcgctgttgagacccgagcgggagaagaacttccccaataacgggatagaaagcctggtggacaagatgagccgctggaagacgtatgcgcaggagcacagggacgatccccgggcgtcgcagggggccacgagccggggcagcgccgcccgtaaacgccggtggcacgacaggcagcggggacagatgtgggacgatgaggactccgccgacgacagcagcgtgttggacttgggtgggagtggtaacccgttcgctcacctgcgcccccgtatcgggcgcatgatgtaagagaaaccgaaaataaatgatactcaccaaggccatggcgaccagcgtgcgttcgtttcttctctgttgttgttgtatctagtatgatgaggcgtgcgtacccggagggtcctcctccctcgtacgagagcgtgatgcagcaggcgatggcggcggcggcgatgcagcccccgctggaggctccttacgtgcccccgcggtacctggcgcctacggaggggcggaacagcattcgttactcggagctggcacccttgtacgataccacccggttgtacctggtggacaacaagtcggcggacatcgcctcgctgaactaccagaacgaccacagcaacttcctgaccaccgtggtgcagaacaatgacttcacccccacggaggccagcacccagaccatcaactttgacgagcgctcgcggtggggcggccagctgaaaaccatcatgcacaccaacatgcccaacgtgaacgagttcatgtacagcaacaagttcaaggcgcgggtgatggtctcccgcaagacccccaatggggtgacagtgacagaggattatgatggtagtcaggatgagctgaagtatgaatgggtggaatttgagctgcccgaaggcaacttctcggtgaccatgaccatcgacctgatgaacaacgccatcatcgacaattacttggcggtggggcggcagaacggggtgctggagagcgacatcggcgtgaagttcgacactaggaacttcaggctgggctgggaccccgtgaccgagctggtcatgcccggggtgtacaccaacgaggctttccatcccgatattgtcttgctgcccggctgcggggtggacttcaccgagagccgcctcagcaacctgctgggcattcgcaagaggcagcccttccaggaaggcttccagatcatgtacgaggatctggaggggggcaacatccccgcgctcctggatgtcgacgcctatgagaaaagcaaggaggatgcagcagctgaagcaactgcagccgtagctaccgcctctaccgaggtcaggggcgataattttgcaagcgccgcagcagtggcagcggccgaggcggctgaaaccgaaagtaagatagtcattcagccggtggagaaggatagcaagaacaggagctacaacgtactaccggacaagataaacaccgcctaccgcagctggtacctagcctacaactatggcgaccccgagaagggcgtgcgctcctggacgctgctcaccacctcggacgtcacctgcggcgtggagcaagtctactggtcgctgcccgacatgatgcaagacccggtcaccttccgctccacgcgtcaagttagcaactacccggtggtgggcgccgagctcctgcccgtctactccaagagcttcttcaacgagcaggccgtctactcgcagcagctgcgcgccttcacctcgcttacgcacgtcttcaaccgcttccccgagaaccagatcctcgtccgcccgcccgcgcccaccattaccaccgtcagtgaaaacgttcctgctctcacagatcacgggaccctgccgctgcgcagcagtatccggggagtccagcgcgtgaccgttactgacgccagacgccgcacctgcccctacgtctacaaggccctgggcatagtcgcgccgcgcgtcctctcgagccgcaccttctaaatgtccattctcatctcgcccagtaataacaccggttggggcctgcgcgcgcccagcaagatgtacggaggcgctcgccaacgctccacgcaacaccccgtgcgcgtgcgcgggcacttccgcgctccctggggcgccctcaagggccgcgtgcggtcgcgcaccaccgtcgacgacgtgatcgaccaggtggtggccgacgcgcgcaactacacccccgccgccgcgcccgtctccaccgtggacgccgtcatcgacagcgtggtggccgacgcgcgccggtacgcccgcgccaagagccggcggcggcgcatcgcccggcggcaccggagcacccccgccatgcgcgcggcgcgagccttgctgcgcagggccaggcgcacgggacgcagggccatgctcagggcggccagacgcgcggcttcaggcgccagcgccggcaggacccggagacgcgcggccacggcggcggcagcggccatcgccagcatgtcccgcccgcggcgagggaacgtgtactgggtgcgcgacgccgccaccggtgtgcgcgtgcccgtgcgcacccgcccccctcgcacttgaagatgttcacttcgcgatgttgatgtgtcccagcggcgaggaggatgtccaagcgcaaattcaaggaagagatgctccaggtcatcgcgcctgagatctacggccctgcggtggtgaaggaggaaagaaagccccgcaaaatcaagcgggtcaaaaaggacaaaaaggaagaagaaagtgatgtggacggattggtggagtttgtgcgcgagttcgccccccggcggcgcgtgcagtggcgcgggcggaaggtgcaaccggtgctgagacccggcaccaccgtggtcttcacgcccggcgagcgctccggcaccgcttccaagcgctcctacgacgaggtgtacggggatgatgatattctggagcaggcggccgagcgcctgggcgagtttgcttacggcaagcgcagccgttccgcaccgaaggaagaggcggtgtccatcccgctggaccacggcaaccccacgccgagcctcaagcccgtgaccttgcagcaggtgctgccgaccgcggcgccgcgccgggggttcaagcgcgagggcgaggatctgtaccccaccatgcagctgatggtgcccaagcgccagaagctggaagacgtgctggagaccatgaaggtggacccggacgtgcagcccgaggtcaaggtgcggcccatcaagcaggtggccccgggcctgggcgtgcagaccgtggacatcaagattcccacggagcccatggaaacgcagaccgagcccatgatcaagcccagcaccagcaccatggaggtgcagacggatccctggatgccatcggctcctagtcgaagaccccggcgcaagtacggcgcggccagcctgctgatgcccaactacgcgctgcatccttccatcatccccacgccgggctaccgcggcacgcgcttctaccgcggtcataccagcagccgccgccgcaagaccaccactcgccgccgccgtcgccgcaccgccgctgcaaccacccctgccgccctggtgcggagagtgtaccgccgcggccgcgcacctctgaccctgccgcgcgcgcgctaccacccgagcatcgccatttaaactttcgcctgctttgcagatcaatggccctcacatgccgccttcgcgttcccattacgggctaccgaggaagaaaaccgcgccgtagaaggctggcggggaacgggatgcgtcgccaccaccaccggcggcggcgcgccatcagcaagcggttggggggaggcttcctgcccgcgctgatccccatcatcgccgcggcgatcggggcgatccccggcattgcttccgtggcggtgcaggcctctcagcgccactgagacacacttggaaacatcttgtaataaaccaatggactctgacgctcctggtcctgtgatgtgttttcgtagacagatggaagacatcaatttttcgtccctggctccgcgacacggcacgcggccgttcatgggcacctggagcgacatcggcaccagccaactgaacgggggcgccttcaattggagcagtctctggagcgggcttaagaatttcgggtccacgcttaaaacctatggcagcaaggcgtggaacagcaccacagggcaggcgctgagggataagctgaaagagcagaacttccagcagaaggtggtcgatgggctcgcctcgggcatcaacggggtggtggacctggccaaccaggccgtgcagcggcagatcaacagccgcctggacccggtgccgcccgccggctccgtggagatgccgcaggtggaggaggagctgcctcccctggacaagcggggcgagaagcgaccccgccccgatgcggaggagacgctgctgacgcacacggacgagccgcccccgtacgaggaggcggtgaaactgggtctgcccaccacgcggcccatcgcgcccctggccaccggggtgctgaaacccgaaaagcccgcgaccctggacttgcctcctccccagccttcccgcccctctacagtggctaagcccctgccgccggtggccgtggcccgcgcgcgacccgggggcaccgcccgccctcatgcgaactggcagagcactctgaacagcatcgtgggtctgggagtgcagagtgtgaagcgccgccgctgctattaaacctaccgtagcgcttaacttgcttgtctgtgtgtgtatgtattatgtcgccgccgccgctgtccaccagaaggaggagtgaagaggcgcgtcgccgagttgcaagatggccaccccatcgatgctgccccagtgggcgtacatgcacatcgccggacaggacgcttcggagtacctgagtccgggtctggtgcagtttgcccgcgccacagacacctacttcagtctggggaacaagtttaggaaccccacggtggcgcccacgcacgatgtgaccaccgaccgcagccagcggctgacgctgcgcttcgtgcccgtggaccgcgaggacaacacctactcgtacaaagtgcgctacacgctggccgtgggcgacaaccgcgtgctggacatggccagcacctactttgacatccgcggcgtgctggatcggggccctagcttcaaaccctactccggcaccgcctacaacagtctggcccccaagggagcacccaacacttgtcagtggacatataaagccgatggtgaaactgccacagaaaaaacctatacatatggaaatgcacccgtgcagggcattaacatcacaaaagatggtattcaacttggaactgacaccgatgatcagccaatctacgcagataaaacctatcagcctgaacctcaagtgggtgatgctgaatggcatgacatcactggtactgatgaaaagtatggaggcagagctcttaagcctgataccaaaatgaagccttgttatggttcttttgccaagcctactaataaagaaggaggtcaggcaaatgtgaaaacaggaacaggcactactaaagaatatgacatagacatggctttctttgacaacagaagtgcggctgctgctggcctagctccagaaattgttttgtatactgaaaatgtggatttggaaactccagatacccatattgtatacaaagcaggcacagatgacagcagctcttctattaatttgggtcagcaagccatgcccaacagacctaactacattggtttcagagacaactttatcgggctcatgtactacaacagcactggcaatatgggggtgctggccggtcaggcttctcagctgaatgctgtggttgacttgcaagacagaaacaccgagctgtcctaccagctcttgcttgactctctgggtgacagaacccggtatttcagtatgtggaatcaggcggtggacagctatgatcctgatgtgcgcattattgaaaatcatggtgtggaggatgaacttcccaactattgtttccctctggatgctgttggcagaacagatacttatcagggaattaaggctaatggaactgatcaaaccacatggaccaaagatgacagtgtcaatgatgctaatgagataggcaagggtaatccattcgccatggaaatcaacatccaagccaacctgtggaggaacttcctctacgccaacgtggccctgtacctgcccgactcttacaagtacacgccggccaatgttaccctgcccaccaacaccaacacctacgattacatgaacggccgggtggtggcgccctcgctggtggactcctacatcaacatcggggcgcgctggtcgctggatcccatggacaacgtgaaccccttcaaccaccaccgcaatgcggggctgcgctaccgctccatgctcctgggcaacgggcgctacgtgcccttccacatccaggtgccccagaaatttttcgccatcaagagcctcctgctcctgcccgggtcctacacctacgagtggaacttccgcaaggacgtcaacatgatcctgcagagctccctcggcaacgacctgcgcacggacggggcctccatctccttcaccagcatcaacctctacgccaccttcttccccatggcgcacaacacggcctccacgctcgaggccatgctgcgcaacgacaccaacgaccagtccttcaacgactacctctcggcggccaacatgctctaccccatcccggccaacgccaccaacgtgcccatctccatcccctcgcgcaactgggccgccttccgcggctggtccttcacgcgtctcaagaccaaggagacgccctcgctgggctccgggttcgacccctacttcgtctactcgggctccatcccctacctcgacggcaccttctacctcaaccacaccttcaagaaggtctccatcaccttcgactcctccgtcagctggcccggcaacgaccggctcctgacgcccaacgagttcgaaatcaagcgcaccgtcgacggcgagggctacaacgtggcccagtgcaacatgaccaaggactggttcctggtccagatgctggcccactacaacatcggctaccagggcttctacgtgcccgagggctacaaggaccgcatgtactccttcttccgcaacttccagcccatgagccgccaggtggtggacgaggtcaactacaaggactaccaggccgtcaccctggcctaccagcacaacaactcgggcttcgtcggctacctcgcgcccaccatgcgccagggccagccctaccccgccaactacccctacccgctcatcggcaagagcgccgtcaccagcgtcacccagaaaaagttcctctgcgacagggtcatgtggcgcatccccttctccagcaacttcatgtccatgggcgcgctcaccgacctcggccagaacatgctctatgccaactccgcccacgcgctagacatgaatttcgaagtcgaccccatggatgagtccacccttctctatgttgtcttcgaagtcttcgacgtcgtccgagtgcaccagccccaccgcggcgtcatcgaggccgtctacctgcgcacccccttctcggccggtaacgccaccacctaagctcttgcttcttgcaagccatggccgcgggctccggcgagcaggagctcagggccatcatccgcgacctgggctgcgggccctacttcctgggcaccttcgataagcgcttcccgggattcatggccccgcacaagctggcctgcgccatcgtcaacacggccggccgcgagaccgggggcgagcactggctggccttcgcctggaacccgcgctcgaacacctgctacctcttcgaccccttcgggttctcggacgagcgcctcaagcagatctaccagttcgagtacgagggcctgctgcgccgcagcgccctggccaccgaggaccgctgcgtcaccctggaaaagtccacccagaccgtgcagggtccgcgctcggccgcctgcgggctcttctgctgcatgttcctgcacgccttcgtgcactggcccgaccgccccatggacaagaaccccaccatgaacttgctgacgggggtgcccaacggcatgctccagtcgccccaggtggaacccaccctgcgccgcaaccaggaggcgctctaccgcttcctcaactcccactccgcctactttcgctcccaccgcgcgcgcatcgagaaggccaccgccttcgaccgcatgaatcaagacatgtaaaccgtgtgtgtatgttaaatgtctttaataaacagcactttcatgttacacatgcatctgagatgatttatttagaaatcgaaagggttctgccgggtctcggcatggcccgcgggcagggacacgttgcggaactggtacttggccagccacttgaactcggggatcagcagtttgggcagcggggtgtcggggaaggagtcggtccacagcttccgcgtcagttgcagggcgcccagcaggtcgggcgcggagatcttgaaatcgcagttgggacccgcgttctgcgcgcgggagttgcggtacacggggttgcagcactggaacaccatcagggccgggtgcttcacgctcgccagcaccgtcgcgtcggtgatgctctccacgtcgaggtcctcggcgttggccatcccgaagggggtcatcttgcaggtctgccttcccatggtgggcacgcacccgggcttgtggttgcaatcgcagtgcagggggatcagcatcatctgggcctggtcggcgttcatccccgggtacatggccttcatgaaagcctccaattgcctgaacgcctgctgggccttggctccctcggtgaagaagaccccgcaggacttgctagagaactggttggtggcgcacccggcgtcgtgcacgcagcagcgcgcgtcgttgttggccagctgcaccacgctgcgcccccagcggttctgggtgatcttggcccggtcggggttctccttcagcgcgcgctgcccgttctcgctcgccacatccatctcgatcatgtgctccttctggatcatggtggtcccgtgcaggcaccgcagcttgccctcggcctcggtgcacccgtgcagccacagcgcgcacccggtgcactcccagttcttgtgggcgatctgggaatgcgcgtgcacgaagccctgcaggaagcggcccatcatggtggtcagggtcttgttgctagtgaaggtcagcggaatgccgcggtgctcctcgttgatgtacaggtggcagatgcggcggtacacctcgccctgctcgggcatcagctggaagttggctttcaggtcggtctccacgcggtagcggtccatcagcatagtcatgatttccatacccttctcccaggccgagacgatgggcaggctcatagggttcttcaccatcatcttagcgctagcagccgcggccagggggtcgctctcgtccagggtctcaaagctccgcttgccgtccttctcggtgatccgcaccggggggtagctgaagcccacggccgccagctcctcctcggcctgtctttcgtcctcgctgtcctggctgacgtcctgcaggaccacatgcttggtcttgcggggtttcttcttgggcggcagcggcggcggagatgttggagatggcgagggggagcgcgagttctcgctcaccactactatctcttcctcttcttggtccgaggccacgcggcggtaggtatgtctcttcgggggcagaggcggaggcgacgggctctcgccgccgcgacttggcggatggctggcagagccccttccgcgttcgggggtgcgctcccggcggcgctctgactgacttcctccgcggccggccattgtgttctcctagggaggaacaacaagcatggagactcagccatcgccaacctcgccatctgcccccaccgccgacgagaagcagcagcagcagaatgaaagcttaaccgccccgccgcccagccccgccacctccgacgcggccgtcccagacatgcaagagatggaggaatccatcgagattgacctgggctatgtgacgcccgcggagcacgaggaggagctggcagtgcgcttttcacaagaagagatacaccaagaacagccagagcaggaagcagagaatgagcagagtcaggctgggctcgagcatgacggcgactacctccacctgagcgggggggaggacgcgctcatcaagcatctggcccggcaggccaccatcgtcaaggatgcgctgctcgaccgcaccgaggtgcccctcagcgtggaggagctcagccgcgcctacgagttgaacctcttctcgccgcgcgtgccccccaagcgccagcccaatggcacctgcgagcccaacccgcgcctcaacttctacccggtcttcgcggtgcccgaggccctggccacctaccacatctttttcaagaaccaaaagatccccgtctcctgccgcgccaaccgcacccgcgccgacgcccttttcaacctgggtcccggcgcccgcctacctgatatcgcctccttggaagaggttcccaagatcttcgagggtctgggcagcgacgagactcgggccgcgaacgctctgcaaggagaaggaggagagcatgagcaccacagcgccctggtcgagttggaaggcgacaacgcgcggctggcggtgctcaaacgcacggtcgagctgacccatttcgcctacccggctctgaacctgccccccaaagtcatgagcgcggtcatggaccaggtgctcatcaagcgcgcgtcgcccatctccgaggacgagggcatgcaagactccgaggagggcaagcccgtggtcagcgacgagcagctggcccggtggctgggtcctaatgctagtccccagagtttggaagagcggcgcaaactcatgatggccgtggtcctggtgaccgtggagctggagtgcctgcgccgcttcttcgccgacgcggagaccctgcgcaaggtcgaggagaacctgcactacctcttcaggcacgggttcgtgcgccaggcctgcaagatctccaacgtggagctgaccaacctggtctcctacatgggcatcttgcacgagaaccgcctggggcagaacgtgctgcacaccaccctgcgcggggaggcccggcgcgactacatccgcgactgcgtctacctctacctctgccacacctggcagacgggcatgggcgtgtggcagcagtgtctggaggagcagaacctgaaagagctctgcaagctcctgcagaagaacctcaagggtctgtggaccgggttcgacgagcgcaccaccgcctcggacctggccgacctcattttccccgagcgcctcaggctgacgctgcgcaacggcctgcccgactttatgagccaaagcatgttgcaaaactttcgctctttcatcctcgaacgctccggaatcctgcccgccacctgctccgcgctgccctcggacttcgtgccgctgaccttccgcgagtgccccccgccgctgtggagccactgctacctgctgcgcctggccaactacctggcctaccactcggacgtgatcgaggacgtcagcggcgagggcctgctcgagtgccactgccgctgcaacctctgcacgccgcaccgctccctggcctgcaacccccagctgctgagcgagacccagatcatcggcaccttcgagttgcaagggcccagcgaaggcgagggttcagccgccaaggggggtctgaaactcaccccggggctgtggacctcggcctacttgcgcaagttcgtgcccgaggactaccatcccttcgagatcaggttctacgaggaccaatcccatccgcccaaggccgagctgtcggcctgcgtcatcacccagggggcgatcctggcccaattgcaagccatccagaaatcccgccaagaattcttgctgaaaaagggccgcggggtctacctcgacccccagaccggtgaggagctcaaccccggcttcccccaggatgccccgaggaaacaagaagctgaaagtggagctgccgcccgtggaggatttggaggaagactgggagaacagcagtcaggcagaggaggaggagatggaggaagactgggacagcactcaggcagaggaggacagcctgcaagacagtctggaggaagacgaggaggaggcagaggaggaggtggaagaagcagccgccgccagaccgtcgtcctcggcgggggagaaagcaagcagcacggataccatctccgctccgggtcggggtcccgctcgaccacacagtagatgggacgagaccggacgattcccgaaccccaccacccagaccggtaagaaggagcggcagggatacaagtcctggcgggggcacaaaaacgccatcgtctcctgcttgcaggcctgcgggggcaacatctccttcacccggcgctacctgctcttccaccgcggggtgaactttccccgcaacatcttgcattactaccgtcacctccacagcccctactacttccaagaagaggcagcagcagcagaaaaagaccagcagaaaaccagcagctagaaaatccacagcggcggcagcaggtggactgaggatcgcggcgaacgagccggcgcaaacccgggagctgaggaaccggatctttcccaccctctatgccatcttccagcagagtcgggggcaggagcaggaactgaaagtcaagaaccgttctctgcgctcgctcacccgcagttgtctgtatcacaagagcgaagaccaacttcagcgcactctcgaggacgccgaggctctcttcaacaagtactgcgcgctcactcttaaagagtagcccgcgcccgcccagtcgcagaaaaaggcgggaattacgtcacctgtgcccttcgccctagccgcctccacccatcatcatgagcaaagagattcccacgccttacatgtggagctaccagccccagatgggcctggccgccggtgccgcccaggactactccacccgcatgaattggctcagcgccgggcccgcgatgatctcacgggtgaatgacatccgcgcccaccgaaaccagatactcctagaacagtcagcgctcaccgccacgccccgcaatcacctcaatccgcgtaattggcccgccgccctggtgtaccaggaaattccccagcccacgaccgtactacttccgcgagacgcccaggccgaagtccagctgactaactcaggtgtccagctggcgggcggcgccaccctgtgtcgtcaccgccccgctcagggtataaagcggctggtgatccggggcagaggcacacagctcaacgacgaggtggtgagctcttcgctgggtctgcgacctgacggagtcttccaactcgccggatcggggagatcttccttcacgcctcgtcaggccgtcctgactttggagagttcgtcctcgcagccccgctcgggtggcatcggcactctccagttcgtggaggagttcactccctcggtctacttcaaccccttctccggctcccccggccactacccggacgagttcatcccgaacttcgacgccatcagcgagtcggtggacggctacgattgaatgtcccatggtggcgcagctgacctagctcggcttcgacacctggaccactgccgccgcttccgctgcttcgctcgggatctcgccgagtttgcctactttgagctgcccgaggagcaccctcagggcccggcccacggagtgcggatcgtcgtcgaagggggcctcgactcccacctgcttcggatcttcagccagcgtccgatcctggtcgagcgcgagcaaggacagacccttctgactctgtactgcatctgcaaccaccccggcctgcatgaaagtctttgttgtctgctgtgtactgagtataataaaagctgagatcagcgactactccggacttccgtgtgttcctgaatccatcaaccagtctttgttcttcaccgggaacgagaccgagctccagctccagtgtaagccccacaagaagtacctcacctggctgttccagggctccccgatcgccgttgtcaaccactgcgacaacgacggagtcctgctgagcggccctgccaaccttactttttccacccgcagaagcaagctccagctcttccaacccttcctccccgggacctatcagtgcgtctcgggaccctgccatcacaccttccacctgatcccgaataccacagcgtcgctccccgctactaacaaccaaactaacctccaccaacgccaccgtcgcgacctttctgaatctaatactaccacccacaccggaggtgagctccgaggtcaaccaacctctgggatttactacggcccctgggaggtggttgggttaatagcgctaggcctagttgcgggtgggcttttggttctctgctacctatacctcccttgctgttcgtacttagtggtgctgtgttgctggtttaagaaatggggaagatcaccctagtgagctgcggtgcgctggtggcggtgttgctttcgattgtgggactgggcggtgcggctgtagtgaaggagaaggccgatccctgcttgcatttcaatcccaacaaatgccagctgagttttcagcccgatggcaatcggtgcgcggtactgatcaagtgcggatgggaatgcgagaacgtgagaatcgagtacaataacaagactcggaacaatactctcgcgtccgtgtggcagcccggggaccccgagtggtacaccgtctctgtccccggtgctgacggctccccgcgcaccgtgaataatactttcatttttgcgcacatgtgcgacacggtcatgtggatgagcaagcagtacgatatgtggccccccacgaaggagaacatcgtggtcttctccatcgcttacagcctgtgcacggcgctaatcaccgctatcgtgtgcctgagcattcacatgctcatcgctattcgccccagaaataatgccgaaaaagaaaaacagccataacgttttttttcacacctttttcagaccatggcctctgttaaatttttgcttttatttgccagtctcattgccgtcattcatggaatgagtaatgagaaaattactatttacactggcactaatcacacattgaaaggtccagaaaaagccacagaagtttcatggtattgttattttaatgaatcagatgtatctactgaactctgtggaaacaataacaaaaaaaatgagagcattactctcatcaagtttcaatgtggatctgacttaaccctaattaacatcactagagactatgtaggtatgtattatggaactacagcaggcatttcggacatggaattttatcaagtttctgtgtctgaacccaccacgcctagaatgaccacaaccacaaaaactacacctgttaccactatgcagctcactaccaataacatttttgccatgcgtcaaatggtcaacaatagcactcaacccaccccacccagtgaggaaattcccaaatccatgattggcattattgttgctgtagtggtgtgcatgttgatcatcgccttgtgcatggtgtactatgccttctgctacagaaagcacagactgaacgacaagctggaacacttactaagtgttgaattttaattttttagaaccatgaagatcctaggccttttaattttttctatcattacctctgctctatgcaattctgacaatgaggacgttactgtcgttgtcggatcaaattatacactgaaaggtccagcgaagggtatgctttcgtggtattgctattttggatctgacactacagaaactgaattatgcaatcttaagaatggcaaaattcaaaattctaaaattaacaattatatatgcaatggtactgatctgatactcctcaatatcacgaaatcatatgctggcagttacacctgccctggagatgatgctgacagtatgattttttacaaagtaactgttgttgatcccactactccacctccacccaccacaactactcacaccacacacacagatcaaaccgcagcagaggaggcagcaaagttagccttgcaggtccaagacagttcatttgttggcattacccctacacctgatcagcggtgtccggggctgctagtcagcggcattgtcggtgtgctttcgggattagcagtcataatcatctgcatgttcatttttgcttgctgctatagaaggctttaccgacaaaaatcagacccactgctgaacctctatgtttaattttttccagagtcatgaaggcagttagcgctctagttttttgttctttgattggcattgttttttgcaatcctattcctaaagttagctttattaaagatgtgaatgttactgaggggggcaatgtgacactggtaggtgtagagggtgctgaaaacaccacctggacaaaataccacctcaatgggtggaaagatatttgcaattggagtgtattagtttatacatgtgagggagttaatcttaccattgtcaatgccacctcagctcaaaatggtagaattcaaggacaaagtgtcagtgtatctaatgggtattttacccaacatacttttatctatgacgttaaagtcataccactgcctacgcctagcccacctagcactaccacacagacaacccacactacacagacaaccacatacagtacattaaatcagcctaccaccactacagcagcagaggttgccagctcgtctggggtccgagtggcatttttgatgttggccccatctagcagtcccactgctagtaccaatgagcagactactgaatttttgtccactgtcgagagccacaccacagctacctccagtgccttctctagcaccgccaatctctcctcgctttcctctacaccaatcagtcccgctactactcctagccccgctcctcttcccactcccctgaagcaaacagacggcggcatgcaatggcagatcaccctgctcattgtgatcgggttggtcatcctggccgtgttgctctactacatcttctgccgccgcattcccaacgcgcaccgcaagccggtctacaagcccatcattgtcgggcagccggagccgcttcaggtggaagggggtctaaggaatcttctcttctcttttacagtatggtgattgaactatgattcctagacaattcttgatcactattcttatctgcctcctccaagtctgtgccaccctcgctctggtggccaacgccagtccagactgtattgggcccttcgcctcctacgtgctctttgccttcaccacctgcatctgctgctgtagcatagtctgcctgcttatcaccttcttccagttcattgactggatctttgtgcgcatcgcctacctgcgccaccacccccagtaccgcgaccagcgagtggcgcggctgctcaggctcctctgataagcatgcgggctctgctacttctcgcgcttctgctgttagtgctcccccgtcccgtcgacccccggtcccccacccagtcccccgaggaggtccgcaaatgcaaattccaagaaccctggaaattcctcaaatgctaccgccaaaaatcagacatgcatcccagctggatcatgatcattgggatcgtgaacattctggcctgcaccctcatctcctttgtgatttacccctgctttgactttggttggaactcgccagaggcgctctatctcccgcctgaacctgacacaccaccacagcaacctcaggcacacgcactaccaccactacagcctaggccacaatacatgcccatattagactatgaggccgagccacagcgacccatgctccccgctattagttacttcaatctaaccggcggagatgactgacccactggccaacaacaacgtcaacgaccttctcctggacatggacggccgcgcctcggagcagcgactcgcccaacttcgcattcgccagcagcaggagagagccgtcaaggagctgcaggatgcggtggccatccaccagtgcaagagaggcatcttctgcctggtgaaacaggccaagatctcctacgaggtcactccaaacgaccatcgcctctcctacgagctcctgcagcagcgccagaagttcacctgcctggtcggagtcaaccccatcgtcatcacccagcagtctggcgataccaaggggtgcatccactgctcctgcgactcccccgactgcgtccacactctgatcaagaccctctgcggcctccgcgacctcctccccatgaactaatcacccccttatccagtgaaataaagatcatattgatgatgattttacagaaataaaaaataatcatttgatttgaaataaagatacaatcatattgatgatttgagtttaacaaaaaaataaagaatcacttacttgaaatctgataccaggtctctgtccatgttttctgccaacaccacttcactcccctcttcccagctctggtactgcaggccccggcgggctgcaaacttcctccacacgctgaaggggatgtcaaattcctcctgtccctcaatcttcattttatcttctatcagatgtccaaaaagcgcgtccgggtggatgatgacttcgaccccgtctacccctacgatgcagacaacgcaccgaccgtgcccttcatcaacccccccttcgtctcttcagatggattccaagagaagcccctgggggtgttgtccctgcgactggccgaccccgtcaccaccaagaacggggaaatcaccctcaagctgggagagggggtggacctcgattcctcgggaaaactcatctccaacacggccaccaaggccgccgcccctctcagtttttccaacaacaccatttcccttaacatggatcaccccttttacactaaagatggaaaattatccttacaagtttctccaccattaaatatactgagaacaagcattctaaacacactagctttaggttttggatcaggtttaggactccgtggctctgccttggcagtacagttagtctctccacttacatttgatactgatggaaacataaagcttaccttagacagaggtttgcatgttacaacaggagatgcaattgaaagcaacataagctgggctaaaggtttaaaatttgaagatggagccatagcaaccaacattggaaatgggttagagtttggaagcagtagtacagaaacaggtgttgatgatgcttacccaatccaagttaaacttggatctggccttagctttgacagtacaggagccataatggctggtaacaaagaagacgataaactcactttgtggacaacacctgatccatcaccaaactgtcaaatactcgcagaaaatgatgcaaaactaacactttgcttgactaaatgtggtagtcaaatactggccactgtgtcagtcttagttgtaggaagtggaaacctaaaccccattactggcaccgtaagcagtgctcaggtgtttctacgttttgatgcaaacggtgttcttttaacagaacattctacactaaaaaaatactgggggtataggcagggagatagcatagatggcactccatataccaatgctgtaggattcatgcccaatttaaaagcttatccaaagtcacaaagttctactactaaaaataatatagtagggcaagtatacatgaatggagatgtttcaaaacctatgcttctcactataaccctcaatggtactgatgacagcaacagtacatattcaatgtcattttcatacacctggactaatggaagctatgttggagcaacatttggggctaactcttataccttctcatacatcgcccaagaatgaacactgtatcccaccctgcatgccaacccttcccaccccactctgtggaacaaactctgaaacacaaaataaaataaagttcaagtgttttattgattcaacagttttacaggattcgagcagttatttttcctccaccctcccaggacatggaatacaccaccctctccccccgcacagccttgaacatctgaatgccattggtgatggacatgcttttggtctccacgttccacacagtttcagagcgagccagtctcgggtcggtcagggagatgaaaccctccgggcactcccgcatctgcacctcacagctcaacagctgaggattgtcctcggtggtcgggatcacggttatctggaagaagcagaagagcggcggtgggaatcatagtccgcgaacgggatcggccggtggtgtcgcatcaggccccgcagcagtcgctgccgccgccgctccgtcaagctgctgctcagggggtccgggtccagggactccctcagcatgatgcccacggccctcagcatcagtcgtctggtgcggcgggcgcagcagcgcatgcggatctcgctcaggtcgctgcagtacgtgcaacacagaaccaccaggttgttcaacagtccatagttcaacacgctccagccgaaactcatcgcgggaaggatgctacccacgtggccgtcgtaccagatcctcaggtaaatcaagtggtgccccctccagaacacgctgcccacgtacatgatctccttgggcatgtggcggttcaccacctcccggtaccacatcaccctctggttgaacatgcagccccggatgatcctgcggaaccacagggccagcaccgccccgcccgccatgcagcgaagagaccccgggtcccggcaatggcaatggaggacccaccgctcgtacccgtggatcatctgggagctgaacaagtctatgttggcacagcacaggcatatgctcatgcatctcttcagcactctcaactcctcgggggtcaaaaccatatcccagggcacggggaactcttgcaggacagcgaaccccgcagaacagggcaatcctcgcacagaacttacattgtgcatggacagggtatcgcaatcaggcagcaccgggtgatcctccaccagagaagcgcgggtctcggtctcctcacagcgtggtaagggggccggccgatacgggtgatggcgggacgcggctgatcgtgttcgcgaccgtgtcatgatgcagttgctttcggacattttcgtacttgctgtagcagaacctggtccgggcgctgcacaccgatcgccggcggcggtctcggcgcttggaacgctcggtgttgaaattgtaaaacagccactctctcagaccgtgcagcagatctagggcctcaggagtgatgaagatcccatcatgcctgatggctctgatcacatcgaccaccgtggaatgggccagacccagccagatgatgcaattttgttgggtttcggtgacggcgggggagggaagaacaggaagaaccatgattaacttttaatccaaacggtctcggagtacttcaaaatgaagatcgcggagatggcacctctcgcccccgctgtgttggtggaaaataacagccaggtcaaaggtgatacggttctcgagatgttccacggtggcttccagcaaagcctccacgcgcacatccagaaacaagacaatagcgaaagcgggagggttctctaattcctcaatcatcatgttacactcctgcaccatccccagataattttcatttttccagccttgaatgattcgaactagttcctgaggtaaatccaagccagccatgataaagagctcgcgcagagcgccctccaccggcattcttaagcacaccctcataattccaagatattctgctcctggttcacctgcagcagattgacaagcggaatatcaaaatctctgccgcgatccctgagctcctccctcagcaataactgtaagtactctttcatatcctctccgaaatttttagccataggaccaccaggaataagattagggcaagccacagtacagataaaccgaagtcctccccagtgagcattgccaaatgcaagactgctataagcatgctggctagacccggtgatatcttccagataactggacagaaaatcgcccaggcaatttttaagaaaatcaacaaaagaaaaatcctccaggtggacgtttagagcctcgggaacaacgatgaagtaaatgcaagcggtgcgttccagcatggttagttagctgatctgtagaaaaaacaaaaatgaacattaaaccatgctagcctggcgaacaggtgggtaaatcgttctctccagcaccaggcaggccacggggtctccggcgcgaccctcgtaaaaattgtcgctatgattgaaaaccatcacagagagacgttcccggtggccggcgtgaatgattcgacaagatgaatacacccccggaacattggcgtccgcgagtgaaaaaaagcgcccgaggaagcaataaggcactacaatgctcagtctcaagtccagcaaagcgatgccatgcggatgaagcacaaaattctcaggtgcgtacaaaatgtaattactcccctcctgcacaggcagcaaagcccccgatccctccaggtacacatacaaagcctcagcgtccatagcttaccgagcagcagcacacaacaggcgcaagagtcagagaaaggctgagctctaacctgtccacccgctctctgctcaatatatagcccagatctacactgacgtaaaggccaaagtctaaaaatacccgccaaataatcacacacgcccagcacacgcccagaaaccggtgacacactcaaaaaaatacgcgcacttcctcaaacgcccaaaactgccgtcatttccgggttcccacgctacgtcatcaaaacacgactttcaaattccgtcgaccgttaaaaacgtcacccgccccgcccctaacggtcgcccgtctctcagccaatcagcgccccgcatccccaaattcaaacacctcatttgcatattaacgcgcacaaaaagtttgaggtatattattgatgatgg

SEQ ID NO: 11 - DNA, 31867 bp, Artificial Sequence
  Description of Artificial Sequence: Synthetic polynucleotide
ccatcttcaataatatacctcaaactttttgtgcgcgttaatatgcaaatgaggcgtttgaatttggggaggaagggcggtgattggtcgagggatgagcgaccgttaggggcggggcgagtgacgttttgatgacgtggttgcgaggaggagccagtttgcaagttctcgtgggaaaagtgacgtcaaacgaggtgtggtttgaacacggaaatactcaattttcccgcgctctctgacaggaaatgaggtgtttctgggcggatgcaagtgaaaacgggccattttcgcgcgaaaactgaatgaggaagtgaaaatctgagtaatttcgcgtttatggcagggaggagtatttgccgagggccgagtagactttgaccgattacgtgggggtttcgattaccgtgtttttcacctaaatttccgcgtacggtgtcaaagtccggtgtttttacgtaggtgtcagctgatcgccagggtatttaaacctgcgctctccagtcaagaggccactcttgagtgccagcgagaagagttttctcctccgcgccgcgagtcagatctacactttgaaagtagggataacagggtaatgacattgattattgactagttgttaatagtaatcaattacggggtcattagttcatagcccatatatggagttccgcgttacataacttacggtaaatggcccgcctggctgaccgcccaacgacccccgcccattgacgtcaataatgacgtatgttcccatagtaacgccaatagggactttccattgacgtcaatgggtggagtatttacggtaaactgcccacttggcagtacatcaagtgtatcatatgccaagtccgccccctattgacgtcaatgacggtaaatggcccgcctggcattatgcccagtacatgaccttacgggactttcctacttggcagtacatctacgtattagtcatcgctattaccatggtgatgcggttttggcagtacaccaatgggcgtggatagcggtttgactcacggggatttccaagtctccaccccattgacgtcaatgggagtttgttttggcaccaaaatcaacgggactttccaaaatgtcgtaataaccccgccccgttgacgcaaatgggcggtaggcgtgtacggtgggaggtctatataagcagagctcgtttagtgaaccgtcagatcgcctggaacgccatccacgctgttttgacctccatagaagacagcgatcgcgccaccatggtgagcaagggcgaggagctgttcaccggggtggtgcccatcctggtcgagctggacggcgacgtaaacggccacaagttcagcgtgtccggcgagggcgagggcgatgccacctacggcaagctgaccctgaagttcatctgcaccaccggcaagctgcccgtgccctggcccaccctcgtgaccaccctgacctacggcgtgcagtgcttcagccgctaccccgaccacatgaagcagcacgacttcttcaagtccgccatgcccgaaggctacgtccaggagcgcaccatcttcttcaaggacgacggcaactacaagacccgcgccgaggtgaagttcgagggcgacaccctggtgaaccgcatcgagctgaagggcatcgacttcaaggaggacggcaacatcctggggcacaagctggagtacaactacaacagccacaacgtctatatcatggccgacaagcagaagaacggcatcaaggtgaacttcaagatccgccacaacatcgaggacggcagcgtgcagctcgccgaccactaccagcagaacacccccatcggcgacggccccgtgctgctgcccgacaaccactacctgagcacccagtccgccctgagcaaagaccccaacgagaagcgcgatcacatggtcctgctggagttcgtgaccgccgccgggatcactctcggcatggacgagctttacaagtagtgagtttaaactcccatttaaatgtgagggttaatgcttcgagcagacatgataagatacattgatgagtttggacaaaccacaactagaatgcagtgaaaaaaatgctttatttgtgaaatttgtgatgctattgctttatttgtaaccattataagctgcaataaacaagttaacaacaacaattgcattcattttatgtttcaggttcagggggagatgtgggaggttttttaaagcaagtaaaacctctacaaatgtggtaaaataactataacggtcctaaggtagcgagtgagtagtgttctggggcgggggaggacctgcatgagggccagaataactgaaatctgtgcttttctgtgtgttgcagcagcatgagcggaagcggctcctttgagggaggggtattcagcccttatctgacggggcgtctcccctcctgggcgggagtgcgtcagaatgtgatgggatccacggtggacggccggcccgtgcagcccgcgaactcttcaaccctgacctatgcaaccctgagctcttcgtcgttggacgcagctgccgccgcagctgctgcatctgccgccagcgccgtgcgcggaatggccatgggcgccggctactacggcactctggtggccaactcgagttccaccaataatcccgccagcctgaacgaggagaagctgttgctgctgatggcccagctcgaggccttgacccagcgcctgggcgagctgacccagcaggtggctcagctgcaggagcagacgcgggccgcggttgccacggtgaaatccaaataaaaaatgaatcaataaataaacggagacggttgttgattttaacacagagtctgaatctttatttgatttttcgcgcgcggtaggccctggaccaccggtctcgatcattgagcacccggtggatcttttccaggacccggtagaggtgggcttggatgttgaggtacatgggcatgagcccgtcccgggggtggaggtagctccattgcagggcctcgtgctcgggggtggtgttgtaaatcacccagtcatagcaggggcgcagggcatggtgttgcacaatatctttgaggaggagactgatggccacgggcagccctttggtgtaggtgtttacaaatctgttgagctgggagggatgcatgcggggggagatgaggtgcatcttggcctggatcttgagattggcgatgttaccgcccagatcccgcctggggttcatgttgtgcaggaccaccagcacggtgtatccggtgcacttggggaatttatcatgcaacttggaagggaaggcgtgaaagaatttggcgacgcctttgtgcccgcccaggttttccatgcactcatccatgatgatggcgatgggcccgtgggcggcggcctgggcaaagacgtttcgggggtcggacacatcatagttgtggtcctgggtgaggtcatcataggccattttaatgaatttggggcggagggtgccggactgggggacaaaggtaccctcgatcccgggggcgtagttcccctcacagatctgcatctcccaggctttgagctcggagggggggatcatgtccacctgcggggcgataaagaacacggtttccggggcgggggagatgagctgggccgaaagcaagttccggagcagctgggacttgccgcagccggtggggccgtagatgaccccgatgaccggctgcaggtggtagttgagggagagacagctgccgtcctcccggaggaggggggccacctcgttcatcatctcgcgcacgtgcatgttctcgcgcaccagttccgccaggaggcgctctccccccagggataggagctcctggagcgaggcgaagtttttcagcggcttgagtccgtcggccatgggcattttggagagggtttgttgcaagagttccaggcggtcccagagctcggtgatgtgctctacggcatctcgatccagcagacctcctcgtttcgcgggttgggacggctgcgggagtagggcaccagacgatgggcgtccagcgcagccagggtccggtccttccagggtcgcagcgtccgcgtcagggtggtctccgtcacggtgaaggggtgcgcgccgggctgggcgcttgcgagggtgcgcttcaggctcatccggctggtcgaaaaccgctcccgatcggcgccctgcgcgtcggccaggtagcaattgaccatgagttcgtagttgagcgcctcggccgcgtggcctttggcgcggagcttacctttggaagtctgcccgcaggcgggacagaggagggacttgagggcgtagagcttgggggcgaggaagacggactcgggggcgtaggcgtccgcgccgcagtgggcgcagacggtctcgcactccacgagccaggtgaggtcgggctggtcggggtcaaaaaccagtttcccgccgttctttttgatgcgtttcttacctttggtctccatgagctcgtgtccccgctgggtgacaaagaggctgtccgtgtccccgtagaccgactttatgggccggtcctcgagcggtgtgccgcggtcctcctcgtagaggaaccccgcccactccgagacgaaagcccgggtccaggccagcacgaaggaggccacgtgggacgggtagcggtcgttgtccaccagcgggtccaccttttccagggtatgcaaacacatgtccccctcgtccacatccaggaaggtgattggcttgtaagtgtaggccacgtgaccgggggtcccggccgggggggtataaaagggtgcgggtccctgctcgtcctcactgtcttccggatcgctgtccaggagcgccagctgttggggtaggtattccctctcgaaggcgggcatgacctcggcactcaggttgtcagtttctagaaacgaggaggatttgatattgacggtgccggcggagatgcctttcaagagcccctcgtccatctggtcagaaaagacgatctttttgttgtcgagcttggtggcgaaggagccgtagagggcgttggagaggagcttggcgatggagcgcatggtctggtttttttccttgtcggcgcgctccttggcggcgatgttgagctgcacgtactcgcgcgccacgcacttccattcggggaagacggtggtcagctcgtcgggcacgattctgacctgccagccccgattatgcagggtgatgaggtccacactggtggccacctcgccgcgcaggggctcattagtccagcagaggcgtccgcccttgcgcgagcagaaggggggcagggggtccagcatgacctcgtcgggggggtcggcatcgatggtgaagatgccgggcaggaggtcggggtcaaagtagctgatggaagtggccagatcgtccagggcagcttgccattcgcgcacggccagcgcgctctcgtagggactgaggggcgtgccccagggcatgggatgggtaagcgcggaggcgtacatgccgcagatgtcgtagacgtagaggggctcctcgaggatgccgatgtaggtggggtagcagcgccccccgcggatgctggcgcgcacgtagtcatacagctcgtgcgagggggcgaggagccccgggcccaggttggtgcgactgggcttttcggcgcggtagacgatctggcggaaaatggcatgcgagttggaggagatggtgggcctttggaagatgttgaagtgggcgtggggcagtccgaccgagtcgcggatgaagtgggcgtaggagtcttgcagcttggcgacgagctcggcggtgactaggacgtccagagcgcagtagtcgagggtctcctggatgatgtcatacttgagctgtcccttttgtttccacagctcgcggttgagaaggaactcttcgcggtccttccagtactcttcgagggggaacccgtcctgatctgcacggtaagagcctagcatgtagaactggttgacggccttgtaggcgcagcagcccttctccacggggagggcgtaggcctgggcggccttgcgcagggaggtgtgcgtgagggcgaaagtgtccctgaccatgaccttgaggaactggtgcttgaagtcgatatcgtcgcagcccccctgctcccagagctggaagtccgtgcgcttcttgtaggcggggttgggcaaagcgaaagtaacatcgttgaagaggatcttgcccgcgcggggcataaagttgcgagtgatgcggaaaggttggggcacctcggcccggttgttgatgacctgggcggcgagcacgatctcgtcgaagccgttgatgttgtggcccacgatgtagagttccacgaatcgcggacggcccttgacgtggggcagtttcttgagctcctcgtaggtgagctcgtcggggtcgctgagcccgtgctgctcgagcgcccagtcggcgagatgggggttggcgcggaggaaggaagtccagagatccacggccagggcggtttgcagacggtcccggtactgacggaactgctgcccgacggccattttttcgggggtgacgcagtagaaggtgcgggggtccccgtgccagcgatcccatttgagctggagggcgagatcgagggcgagctcgacgagccggtcgtccccggagagtttcatgaccagcatgaaggggacgagctgcttgccgaaggaccccatccaggtgtaggtttccacatcgtaggtgaggaagagcctttcggtgcgaggatgcgagccgatggggaagaactggatctcctgccaccaattggaggaatggctgttgatgtgatggaagtagaaatgccgacggcgcgccgaacactcgtgcttgtgtttatacaagcggccacagtgctcgcaacgctgcacgggatgcacgtgctgcacgagctgtacctgagttcctttgacgaggaatttcagtgggaagtggagtcgtggcgcctgcatctcgtgctgtactacgtcgtggtggtcggcctggccctcttctgcctcgatggtggtcatgctgacgagcccgcgcgggaggcaggtccagacctcggcgcgagcgggtcggagagcgaggacgagggcgcgcaggccggagctgtccagggtcctgagacgctgcggagtcaggtcagtgggcagcggcggcgcgcggttgacttgcaggagtttttccagggcgcgcgggaggtccagatggtacttgatctccaccgcgccattggtggcgacgtcgatggcttgcagggtcccgtgcccctggggtgtgaccaccgtcccccgtttcttcttgggcggctggggcgacgggggcggtgcctcttccatggttagaagcggcggcgaggacgcgcgccgggcggcaggggcggctcggggcccggaggcaggggcggcaggggcacgtcggcgccgcgcgcgggtaggttctggtactgcgcccggagaagactggcgtgagcgacgacgcgacggttgacgtcctggatctgacgcctctgggtgaaggccacgggacccgtgagtttgaacctgaaagagagttcgacagaatcaatctcggtatcgttgacggcggcctgccgcaggatctcttgcacgtcgcccgagttgtcctggtaggcgatctcggtcatgaactgctcgatctcctcctcttgaaggtctccgcggccggcgcgctccacggtggccgcgaggtcgttggagatgcggcccatgagctgcgagaaggcgttcatgcccgcctcgttccagacgcggctgtagaccacgacgccctcgggatcgcgggcgcgcatgaccacctgggcgaggttgagctccacgtggcgcgtgaagaccgcgtagttgcagaggcgctggtagaggtagttgagcgtggtggcgatgtgctcggtgacgaagaaatacatgatccagcggcggagcggcatctcgctgacgtcgcccagcgcctccaaacgttccatggcctcgtaaaagtccacggcgaagttgaaaaactgggagttgcgcgccgagacggtcaactcctcctccagaagacggatgagctcggcgatggtggcgcgcacctcgcgctcgaaggcccccgggagttcctccacttcctcttcttcctcctccactaacatctcttctacttcctcctcaggcggcagtggtggcgggggagggggcctgcgtcgccggcggcgcacgggcagacggtcgatgaagcgctcgatggtctcgccgcgccggcgtcgcatggtctcggtgacggcgcgcccgtcctcgcggggccgcagcgtgaagacgccgccgcgcatctccaggtggccgggggggtccccgttgggcagggagagggcgctgacgatgcatcttatcaattgccccgtagggactccgcgcaaggacctgagcgtctcgagatccacgggatctgaaaaccgctgaacgaaggcttcgagccagtcgcagtcgcaaggtaggctgagcacggtttcttctggcgggtcatgttggttgggagcggggcgggcgatgctgctggtgatgaagttgaaataggcggttctgagacggcggatggtggcgaggagcaccaggtctttgggcccggcttgctggatgcgcagacggtcggccatgccccaggcgtggtcctgacacctggccaggtccttgtagtagtcctgcatgagccgctccacgggcacctcctcctcgcccgcgcggccgtgcatgcgcgtgagcccgaagccgcgctggggctggacgagcgccaggtcggcgacgacgcgctcggcgaggatggcttgctggatctgggtgagggtggtctggaagtcatcaaagtcgacgaagcggtggtaggctccggtgttgatggtgtaggagcagttggccatgacggaccagttgacggtctggtggcccggacgcacgagctcgtggtacttgaggcgcgagtaggcgcgcgtgtcgaagatgtagtcgttgcaggtgcgcaccaggtactggtagccgatgaggaagtgcggcggcggctggcggtagagcggccatcgctcggtggcgggggcgccgggcgcgaggtcctcgagcatggtgcggtggtagccgtagatgtacctggacatccaggtgatgccggcggcggtggtggaggcgcgcgggaactcgcggacgcggttccagatgttgcgcagcggcaggaagtagttcatggtgggcacggtctggcccgtgaggcgcgcgcagtcgtggatgctctatacgggcaaaaacgaaagcggtcagcggctcgactccgtggcctggaggctaagcgaacgggttgggctgcgcgtgtaccccggttcgaatctcgaatcaggctggagccgcagctaacgtggtattggcactcccgtctcgacccaagcctgcaccaaccctccaggatacggaggcgggtcgttttgcaacttttttttggaggccggatgagactagtaagcgcggaaagcggccgaccgcgatggctcgctgccgtagtctggagaagaatcgccagggttgcgttgcggtgtgccccggttcgaggccggccggattccgcggctaacgagggcgtggctgccccgtcgtttccaagaccccatagccagccgacttctccagttacggagcgagcccctcttttgttttgtttgtttttgccagatgcatcccgtactgcggcagatgcgcccccaccaccctccaccgcaacaacagccccctccacagccggcgcttctgcccccgccccagcagcaacttccagccacgaccgccgcggccgccgtgagcggggctggacagagttatgatcaccagctggccttggaagagggcgaggggctggcgcgcctgggggcgtcgtcgccggagcggcacccgcgcgtgcagatgaaaagggacgctcgcgaggcctacgtgcccaagcagaacctgttcagagacaggagcggcgaggagcccgaggagatgcgcgcggcccggttccacgcggggcgggagctgcggcgcggcctggaccgaaagagggtgctgagggacgaggatttcgaggcggacgagctgacggggatcagccccgcgcgcgcgcacgtggccgcggccaacctggtcacggcgtacgagcagaccgtgaaggaggagagcaacttccaaaaatccttcaacaaccacgtgcgcaccctgatcgcgcgcgaggaggtgaccctgggcctgatgcacctgtgggacctgctggaggccatcgtgcagaaccccaccagcaagccgctgacggcgcagctgttcctggtggtgcagcatagtcgggacaacgaagcgttcagggaggcgctgctgaatatcaccgagcccgagggccgctggctcctggacctggtgaacattctgcagagcatcgtggtgcaggagcgcgggctgccgctgtccgagaagctggcggccatcaacttctcggtgctgagtttgggcaagtactacgctaggaagatctacaagaccccgtacgtgcccatagacaaggaggtgaagatcgacgggttttacatgcgcatgaccctgaaagtgctgaccctgagcgacgatctgggggtgtaccgcaacgacaggatgcaccgtgcggtgagcgccagcaggcggcgcgagctgagcgaccaggagctgatgcatagtctgcagcgggccctgaccggggccgggaccgagggggagagctactttgacatgggcgcggacctgcactggcagcccagccgccgggccttggaggcggcggcaggaccctacgtagaagaggtggacgatgaggtggacgaggagggcgagtacctggaagactgatggcgcgaccgtatttttgctagatgcaacaacaacagccacctcctgatcccgcgatgcgggcggcgctgcagagccagccgtccggcattaactcctcggacgattggacccaggccatgcaacgcatcatggcgctgacgacccgcaaccccgaagcctttagacagcagccccaggccaaccggctctcggccatcctggaggccgtggtgccctcgcgctccaaccccacgcacgagaaggtcctggccatcgtgaacgcgctggtggagaacaaggccatccgcggcgacgaggccggcctggtgtacaacgcgctgctggagcgcgtggcccgctacaacagcaccaacgtgcagaccaacctggaccgcatggtgaccgacgtgcgcgaggccgtggcccagcgcgagcggttccaccgcgagtccaacctgggatccatggtggcgctgaacgccttcctcagcacccagcccgccaacgtgccccggggccaggaggactacaccaacttcatcagcgccctgcgcctgatggtgaccgaggtgccccagagcgaggtgtaccagtccgggccggactacttcttccagaccagtcgccagggcttgcagaccgtgaacctgagccaggctttcaagaacttgcagggcctgtggggcgtgcaggccccggtcggggaccgcgcgacggtgtcgagcctgctgacgccgaactcgcgcctgctgctgctgctggtggcccccttcacggacagcggcagcatcaaccgcaactcgtacctgggctacctgattaacctgtaccgcgaggccatcggccaggcgcacgtggacgagcagacctaccaggagatcacccacgtgagccgcgccctgggccaggacgacccgggcaacctggaagccaccctgaactttttgctgaccaaccggtcgcagaagatcccgccccagtacgcgctcagcaccgaggaggagcgcatcctgcgttacgtgcagcagagcgtgggcctgttcctgatgcaggagggggccacccccagcgccgcgctcgacatgaccgcgcgcaacatggagcccagcatgtacgccagcaaccgcccgttcatcaataaactgatggactacttgcatcgggcggccgccatgaactctgactatttcaccaacgccatcctgaatccccactggctcccgccgccggggttctacacgggcgagtacgacatgcccgaccccaatgacgggttcctgtgggacgatgtggacagcagcgtgttctccccccgaccgggtgctaacgagcgccccttgtggaagaaggaaggcagcgaccgacgcccgtcctcggcgctgtccggccgcgagggtgctgccgcggcggtgcccgaggccgccagtcctttcccgagcttgcccttctcgctgaacagtatccgcagcagcgagctgggcaggatcacgcgcccgcgcttgctgggcgaagaggagtacttgaatgactcgctgttgagacccgagcgggagaagaacttccccaataacgggatagaaagcctggtggacaagatgagccgctggaagacgtatgcgcaggagcacagggacgatccccgggcgtcgcagggggccacgagccggggcagcgccgcccgtaaacgccggtggcacgacaggcagcggggacagatgtgggacgatgaggactccgccgacgacagcagcgtgttggacttgggtgggagtggtaacccgttcgctcacctgcgcccccgtatcgggcgcatgatgtaagagaaaccgaaaataaatgatactcaccaaggccatggcgaccagcgtgcgttcgtttcttctctgttgttgttgtatctagtatgatgaggcgtgcgtacccggagggtcctcctccctcgtacgagagcgtgatgcagcaggcgatggcggcggcggcgatgcagcccccgctggaggctccttacgtgcccccgcggtacctggcgcctacggaggggcggaacagcattcgttactcggagctggcacccttgtacgataccacccggttgtacctggtggacaacaagtcggcggacatcgcctcgctgaactaccagaacgaccacagcaacttcctgaccaccgtggtgcagaacaatgacttcacccccacggaggccagcacccagaccatcaactttgacgagcgctcgcggtggggcggccagctgaaaaccatcatgcacaccaacatgcccaacgtgaacgagttcatgtacagcaacaagttcaaggcgcgggtgatggtctcccgcaagacccccaatggggtgacagtgacagaggattatgatggtagtcaggatgagctgaagtatgaatgggtggaatttgagctgcccgaaggcaacttctcggtgaccatgaccatcgacctgatgaacaacgccatcatcgacaattacttggcggtggggcggcagaacggggtgctggagagcgacatcggcgtgaagttcgacactaggaacttcaggctgggctgggaccccgtgaccgagctggtcatgcccggggtgtacaccaacgaggctttccatcccgatattgtcttgctgcccggctgcggggtggacttcaccgagagccgcctcagcaacctgctgggcattcgcaagaggcagcccttccaggaaggcttccagatcatgtacgaggatctggaggggggcaacatccccgcgctcctggatgtcgacgcctatgagaaaagcaaggaggatgcagcagctgaagcaactgcagccgtagctaccgcctctaccgaggtcaggggcgataattttgcaagcgccgcagcagtggcagcggccgaggcggctgaaaccgaaagtaagatagtcattcagccggtggagaaggatagcaagaacaggagctacaacgtactaccggacaagataaacaccgcctaccgcagctggtacctagcctacaactatggcgaccccgagaagggcgtgcgctcctggacgctgctcaccacctcggacgtcacctgcggcgtggagcaagtctactggtcgctgcccgacatgatgcaagacccggtcaccttccgctccacgcgtcaagttagcaactacccggtggtgggcgccgagctcctgcccgtctactccaagagcttcttcaacgagcaggccgtctactcgcagcagctgcgcgccttcacctcgcttacgcacgtcttcaaccgcttccccgagaaccagatcctcgtccgcccgcccgcgcccaccattaccaccgtcagtgaaaacgttcctgctctcacagatcacgggaccctgccgctgcgcagcagtatccggggagtccagcgcgtgaccgttactgacgccagacgccgcacctgcccctacgtctacaaggccctgggcatagtcgcgccgcgcgtcctctcgagccgcaccttctaaatgtccattctcatctcgcccagtaataacaccggttggggcctgcgcgcgcccagcaagatgtacggaggcgctcgccaacgctccacgcaacaccccgtgcgcgtgcgcgggcacttccgcgctccctggggcgccctcaagggccgcgtgcggtcgcgcaccaccgtcgacgacgtgatcgaccaggtggtggccgacgcgcgcaactacacccccgccgccgcgcccgtctccaccgtggacgccgtcatcgacagcgtggtggccgacgcgcgccggtacgcccgcgccaagagccggcggcggcgcatcgcccggcggcaccggagcacccccgccatgcgcgcggcgcgagccttgctgcgcagggccaggcgcacgggacgcagggccatgctcagggcggccagacgcgcggcttcaggcgccagcgccggcaggacccggagacgcgcggccacggcggcggcagcggccatcgccagcatgtcccgcccgcggcgagggaacgtgtactgggtgcgcgacgccgccaccggtgtgcgcgtgcccgtgcgcacccgcccccctcgcacttgaagatgttcacttcgcgatgttgatgtgtcccagcggcgaggaggatgtccaagcgcaaattcaaggaagagatgctccaggtcatcgcgcctgagatctacggccctgcggtggtgaaggaggaaagaaagccccgcaaaatcaagcgggtcaaaaaggacaaaaaggaagaagaaagtgatgtggacggattggtggagtttgtgcgcgagttcgccccccggcggcgcgtgcagtggcgcgggcggaaggtgcaaccggtgctgagacccggcaccaccgtggtcttcacgcccggcgagcgctccggcaccgcttccaagcgctcctacgacgaggtgtacggggatgatgatattctggagcaggcggccgagcgcctgggcgagtttgcttacggcaagcgcagccgttccgcaccgaaggaagaggcggtgtccatcccgctggaccacggcaaccccacgccgagcctcaagcccgtgaccttgcagcaggtgctgccgaccgcggcgccgcgccgggggttcaagcgcgagggcgaggatctgtaccccaccatgcagctgatggtgcccaagcgccagaagctggaagacgtgctggagaccatgaaggtggacccggacgtgcagcccgaggtcaaggtgcggcccatcaagcaggtggccccgggcctgggcgtgcagaccgtggacatcaagattcccacggagcccatggaaacgcagaccgagcccatgatcaagcccagcaccagcaccatggaggtgcagacggatccctggatgccatcggctcctagtcgaagaccccggcgcaagtacggcgcggccagcctgctgatgcccaactacgcgctgcatccttccatcatccccacgccgggctaccgcggcacgcgcttctaccgcggtcataccagcagccgccgccgcaagaccaccactcgccgccgccgtcgccgcaccgccgctgcaaccacccctgccgccctggtgcggagagtgtaccgccgcggccgcgcacctctgaccctgccgcgcgcgcgctaccacccgagcatcgccatttaaactttcgcctgctttgcagatcaatggccctcacatgccgccttcgcgttcccattacgggctaccgaggaagaaaaccgcgccgtagaaggctggcggggaacgggatgcgtcgccaccaccaccggcggcggcgcgccatcagcaagcggttggggggaggcttcctgcccgcgctgatccccatcatcgccgcggcgatcggggcgatccccggcattgcttccgtggcggtgcaggcctctcagcgccactgagacacacttggaaacatcttgtaataaaccaatggactctgacgctcctggtcctgtgatgtgttttcgtagacagatggaagacatcaatttttcgtccctggctccgcgacacggcacgcggccgttcatgggcacctggagcgacatcggcaccagccaactgaacgggggcgccttcaattggagcagtctctggagcgggcttaagaatttcgggtccacgcttaaaacctatggcagcaaggcgtggaacagcaccacagggcaggcgctgagggataagctgaaagagcagaacttccagcagaaggtggtcgatgggctcgcctcgggcatcaacggggtggtggacctggccaaccaggccgtgcagcggcagatcaacagccgcctggacccggtgccgcccgccggctccgtggagatgccgcaggtggaggaggagctgcctcccctggacaagcggggcgagaagcgaccccgccccgatgcggaggagacgctgctgacgcacacggacgagccgcccccgtacgaggaggcggtgaaactgggtctgcccaccacgcggcccatcgcgcccctggccaccggggtgctgaaacccgaaaagcccgcgaccctggacttgcctcctccccagccttcccgcccctctacagtggctaagcccctgccgccggtggccgtggcccgcgcgcgacccgggggcaccgcccgccctcatgcgaactggcagagcactctgaacagcatcgtgggtctgggagtgcagagtgtgaagcgccgccgctgctattaaacctaccgtagcgcttaacttgcttgtctgtgtgtgtatgtattatgtcgccgccgccgctgtccaccagaaggaggagtgaagaggcgcgtcgccgagttgcaagatggccaccccatcgatgctgccccagtgggcgtacatgcacatcgccggacaggacgcttcggagtacctgagtccgggtctggtgcagtttgcccgcgccacagacacctacttcagtctggggaacaagtttaggaaccccacggtggcgcccacgcacgatgtgaccaccgaccgcagccagcggctgacgctgcgcttcgtgcccgtggaccgcgaggacaacacctactcgtacaaagtgcgctacacgctggccgtgggcgacaaccgcgtgctggacatggccagcacctactttgacatccgcggcgtgctggatcggggccctagcttcaaaccctactccggcaccgcctacaacagtctggcccccaagggagcacccaacacttgtcagtggacatataaagccgatggtgaaactgccacagaaaaaacctatacatatggaaatgcacccgtgcagggcattaacatcacaaaagatggtattcaacttggaactgacaccgatgatcagccaatctacgcagataaaacctatcagcctgaacctcaagtgggtgatgctgaatggcatgacatcactggtactgatgaaaagtatggaggcagagctcttaagcctgataccaaaatgaagccttgttatggttcttttgccaagcctactaataaagaaggaggtcaggcaaatgtgaaaacaggaacaggcactactaaagaatatgacatagacatggctttctttgacaacagaagtgcggctgctgctggcctagctccagaaattgttttgtatactgaaaatgtggatttggaaactccagatacccatattgtatacaaagcaggcacagatgacagcagctcttctattaatttgggtcagcaagccatgcccaacagacctaactacattggtttcagagacaactttatcgggctcatgtactacaacagcactggcaatatgggggtgctggccggtcaggcttctcagctgaatgctgtggttgacttgcaagacagaaacaccgagctgtcctaccagctcttgcttgactctctgggtgacagaacccggtatttcagtatgtggaatcaggcggtggacagctatgatcctgatgtgcgcattattgaaaatcatggtgtggaggatgaacttcccaactattgtttccctctggatgctgttggcagaacagatacttatcagggaattaaggctaatggaactgatcaaaccacatggaccaaagatgacagtgtcaatgatgctaatgagataggcaagggtaatccattcgccatggaaatcaacatccaagccaacctgtggaggaacttcctctacgccaacgtggccctgtacctgcccgactcttacaagtacacgccggccaatgttaccctgcccaccaacaccaacacctacgattacatgaacggccgggtggtggcgccctcgctggtggactcctacatcaacatcggggcgcgctggtcgctggatcccatggacaacgtgaaccccttcaaccaccaccgcaatgcggggctgcgctaccgctccatgctcctgggcaacgggcgctacgtgcccttccacatccaggtgccccagaaatttttcgccatcaagagcctcctgctcctgcccgggtcctacacctacgagtggaacttccgcaaggacgtcaacatgatcctgcagagctccctcggcaacgacctgcgcacggacggggcctccatctccttcaccagcatcaacctctacgccaccttcttccccatggcgcacaacacggcctccacgctcgaggccatgctgcgcaacgacaccaacgaccagtccttcaacgactacctctcggcggccaacatgctctaccccatcccggccaacgccaccaacgtgcccatctccatcccctcgcgcaactgggccgccttccgcggctggtccttcacgcgtctcaagaccaaggagacgccctcgctgggctccgggttcgacccctacttcgtctactcgggctccatcccctacctcgacggcaccttctacctcaaccacaccttcaagaaggtctccatcaccttcgactcctccgtcagctggcccggcaacgaccggctcctgacgcccaacgagttcgaaatcaagcgcaccgtcgacggcgagggctacaacgtggcccagtgcaacatgaccaaggactggttcctggtccagatgctggcccactacaacatcggctaccagggcttctacgtgcccgagggctacaaggaccgcatgtactccttcttccgcaacttccagcccatgagccgccaggtggtggacgaggtcaactacaaggactaccaggccgtcaccctggcctaccagcacaacaactcgggcttcgtcggctacctcgcgcccaccatgcgccagggccagccctaccccgccaactacccctacccgctcatcggcaagagcgccgtcaccagcgtcacccagaaaaagttcctctgcgacagggtcatgtggcgcatccccttctccagcaacttcatgtccatgggcgcgctcaccgacctcggccagaacatgctctatgccaactccgcccacgcgctagacatgaatttcgaagtcgaccccatggatgagtccacccttctctatgttgtcttcgaagtcttcgacgtcgtccgagtgcaccagccccaccgcggcgtcatcgaggccgtctacctgcgcacccccttctcggccggtaacgccaccacctaagctcttgcttcttgcaagccatggccgcgggctccggcgagcaggagctcagggccatcatccgcgacctgggctgcgggccctacttcctgggcaccttcgataagcgcttcccgggattcatggccccgcacaagctggcctgcgccatcgtcaacacggccggccgcgagaccgggggcgagcactggctggccttcgcctggaacccgcgctcgaacacctgctacctcttcgaccccttcgggttctcggacgagcgcctcaagcagatctaccagttcgagtacgagggcctgctgcgccgcagcgccctggccaccgaggaccgctgcgtcaccctggaaaagtccacccagaccgtgcagggtccgcgctcggccgcctgcgggctcttctgctgcatgttcctgcacgccttcgtgcactggcccgaccgccccatggacaagaaccccaccatgaacttgctgacgggggtgcccaacggcatgctccagtcgccccaggtggaacccaccctgcgccgcaaccaggaggcgctctaccgcttcctcaactcccactccgcctactttcgctcccaccgcgcgcgcatcgagaaggccaccgccttcgaccgcatgaatcaagacatgtaaaccgtgtgtgtatgttaaatgtctttaataaacagcactttcatgttacacatgcatctgagatgatttatttagaaatcgaaagggttctgccgggtctcggcatggcccgcgggcagggacacgttgcggaactggtacttggccagccacttgaactcggggatcagcagtttgggcagcggggtgtcggggaaggagtcggtccacagcttccgcgtcagttgcagggcgcccagcaggtcgggcgcggagatcttgaaatcgcagttgggacccgcgttctgcgcgcgggagttgcggtacacggggttgcagcactggaacaccatcagggccgggtgcttcacgctcgccagcaccgtcgcgtcggtgatgctctccacgtcgaggtcctcggcgttggccatcccgaagggggtcatcttgcaggtctgccttcccatggtgggcacgcacccgggcttgtggttgcaatcgcagtgcagggggatcagcatcatctgggcctggtcggcgttcatccccgggtacatggccttcatgaaagcctccaattgcctgaacgcctgctgggccttggctccctcggtgaagaagaccccgcaggacttgctagagaactggttggtggcgcacccggcgtcgtgcacgcagcagcgcgcgtcgttgttggccagctgcaccacgctgcgcccccagcggttctgggtgatcttggcccggtcggggttctccttcagcgcgcgctgcccgttctcgctcgccacatccatctcgatcatgtgctccttctggatcatggtggtcccgtgcaggcaccgcagcttgccctcggcctcggtgcacccgtgcagccacagcgcgcacccggtgcactcccagttcttgtgggcgatctgggaatgcgcgtgcacgaagccctgcaggaagcggcccatcatggtggtcagggtcttgttgctagtgaaggtcagcggaatgccgcggtgctcctcgttgatgtacaggtggcagatgcggcggtacacctcgccctgctcgggcatcagctggaagttggctttcaggtcggtctccacgcggtagcggtccatcagcatagtcatgatttccatacccttctcccaggccgagacgatgggcaggctcatagggttcttcaccatcatcttagcgctagcagccgcggccagggggtcgctctcgtccagggtctcaaagctccgcttgccgtccttctcggtgatccgcaccggggggtagctgaagcccacggccgccagctcctcctcggcctgtctttcgtcctcgctgtcctggctgacgtcctgcaggaccacatgcttggtcttgcggggtttcttcttgggcggcagcggcggcggagatgttggagatggcgagggggagcgcgagttctcgctcaccactactatctcttcctcttcttggtccgaggccacgcggcggtaggtatgtctcttcgggggcagaggcggaggcgacgggctctcgccgccgcgacttggcggatggctggcagagccccttccgcgttcgggggtgcgctcccggcggcgctctgactgacttcctccgcggccggccattgtgttctcctagggaggaacaacaagcatggagactcagccatcgccaacctcgccatctgcccccaccgccgacgagaagcagcagcagcagaatgaaagcttaaccgccccgccgcccagccccgccacctccgacgcggccgtcccagacatgcaagagatggaggaatccatcgagattgacctgggctatgtgacgcccgcggagcacgaggaggagctggcagtgcgcttttcacaagaagagatacaccaagaacagccagagcaggaagcagagaatgagcagagtcaggctgggctcgagcatgacggcgactacctccacctgagcgggggggaggacgcgctcatcaagcatctggcccggcaggccaccatcgtcaaggatgcgctgctcgaccgcaccgaggtgcccctcagcgtggaggagctcagccgcgcctacgagttgaacctcttctcgccgcgcgtgccccccaagcgccagcccaatggcacctgcgagcccaacccgcgcctcaacttctacccggtcttcgcggtgcccgaggccctggccacctaccacatctttttcaagaaccaaaagatccccgtctcctgccgcgccaaccgcacccgcgccgacgcccttttcaacctgggtcccggcgcccgcctacctgatatcgcctccttggaagaggttcccaagatcttcgagggtctgggcagcgacgagactcgggccgcgaacgctctgcaaggagaaggaggagagcatgagcaccacagcgccctggtcgagttggaaggcgacaacgcgcggctggcggtgctcaaacgcacggtcgagctgacccatttcgcctacccggctctgaacctgccccccaaagtcatgagcgcggtcatggaccaggtgctcatcaagcgcgcgtcgcccatctccgaggacgagggcatgcaagactccgaggagggcaagcccgtggtcagcgacgagcagctggcccggtggctgggtcctaatgctagtccccagagtttggaagagcggcgcaaactcatgatggccgtggtcctggtgaccgtggagctggagtgcctgcgccgcttcttcgccgacgcggagaccctgcgcaaggtcgaggagaacctgcactacctcttcaggcacgggttcgtgcgccaggcctgcaagatctccaacgtggagctgaccaacctggtctcctacatgggcatcttgcacgagaaccgcctggggcagaacgtgctgcacaccaccctgcgcggggaggcccggcgcgactacatccgcgactgcgtctacctctacctctgccacacctggcagacgggcatgggcgtgtggcagcagtgtctggaggagcagaacctgaaagagctctgcaagctcctgcagaagaacctcaagggtctgtggaccgggttcgacgagcgcaccaccgcctcggacctggccgacctcattttccccgagcgcctcaggctgacgctgcgcaacggcctgcccgactttatgagccaaagcatgttgcaaaactttcgctctttcatcctcgaacgctccggaatcctgcccgccacctgctccgcgctgccctcggacttcgtgccgctgaccttccgcgagtgccccccgccgctgtggagccactgctacctgctgcgcctggccaactacctggcctaccactcggacgtgatcgaggacgtcagcggcgagggcctgctcgagtgccactgccgctgcaacctctgcacgccgcaccgctccctggcctgcaacccccagctgctgagcgagacccagatcatcggcaccttcgagttgcaagggcccagcgaaggcgagggttcagccgccaaggggggtctgaaactcaccccggggctgtggacctcggcctacttgcgcaagttcgtgcccgaggactaccatcccttcgagatcaggttctacgaggaccaatcccatccgcccaaggccgagctgtcggcctgcgtcatcacccagggggcgatcctggcccaattgcaagccatccagaaatcccgccaagaattcttgctgaaaaagggccgcggggtctacctcgacccccagaccggtgaggagctcaaccccggcttcccccaggatgccccgaggaaacaagaagctgaaagtggagctgccgcccgtggaggatttggaggaagactgggagaacagcagtcaggcagaggaggaggagatggaggaagactgggacagcactcaggcagaggaggacagcctgcaagacagtctggaggaagacgaggaggaggcagaggaggaggtggaagaagcagccgccgccagaccgtcgtcctcggcgggggagaaagcaagcagcacggataccatctccgctccgggtcggggtcccgctcgaccacacagtagatgggacgagaccggacgattcccgaaccccaccacccagaccggtaagaaggagcggcagggatacaagtcctggcgggggcacaaaaacgccatcgtctcctgcttgcaggcctgcgggggcaacatctccttcacccggcgctacctgctcttccaccgcggggtgaactttccccgcaacatcttgcattactaccgtcacctccacagcccctactacttccaagaagaggcagcagcagcagaaaaagaccagcagaaaaccagcagctagaaaatccacagcggcggcagcaggtggactgaggatcgcggcgaacgagccggcgcaaacccgggagctgaggaaccggatctttcccaccctctatgccatcttccagcagagtcgggggcaggagcaggaactgaaagtcaagaaccgttctctgcgctcgctcacccgcagttgtctgtatcacaagagcgaagaccaacttcagcgcactctcgaggacgccgaggctctcttcaacaagtactgcgcgctcactcttaaagagtagcccgcgcccgcccagtcgcagaaaaaggcgggaattacgtcacctgtgcccttcgccctagccgcctccacccatcatcatgagcaaagagattcccacgccttacatgtggagctaccagccccagatgggcctggccgccggtgccgcccaggactactccacccgcatgaattggctcagcgccgggcccgcgatgatctcacgggtgaatgacatccgcgcccaccgaaaccagatactcctagaacagtcagcgctcaccgccacgccccgcaatcacctcaatccgcgtaattggcccgccgccctggtgtaccaggaaattccccagcccacgaccgtactacttccgcgagacgcccaggccgaagtccagctgactaactcaggtgtccagctggcgggcggcgccaccctgtgtcgtcaccgccccgctcagggtataaagcggctggtgatccggggcagaggcacacagctcaacgacgaggtggtgagctcttcgctgggtctgcgacctgacggagtcttccaactcgccggatcggggagatcttccttcacgcctcgtcaggccgtcctgactttggagagttcgtcctcgcagccccgctcgggtggcatcggcactctccagttcgtggaggagttcactccctcggtctacttcaaccccttctccggctcccccggccactacccggacgagttcatcccgaacttcgacgccatcagcgagtcggtggacggctacgattgaatgtcccatggtggcgcagctgacctagctcggcttcgacacctggaccactgccgccgcttccgctgcttcgctcgggatctcgccgagtttgcctactttgagctgcccgaggagcaccctcagggcccggcccacggagtgcggatcgtcgtcgaagggggcctcgactcccacctgcttcggatcttcagccagcgtccgatcctggtcgagcgcgagcaaggacagacccttctgactctgtactgcatctgcaaccaccccggcctgcatgaaagtctttgttgtctgctgtgtactgagtataataaaagctgagatcagcgactactccggacttccgtgtgttcctgaatccatcaaccagtctttgttcttcaccgggaacgagaccgagctccagctccagtgtaagccccacaagaagtacctcacctggctgttccagggctccccgatcgccgttgtcaaccactgcgacaacgacggagtcctgctgagcggccctgccaaccttactttttccacccgcagaagcaagctccagctcttccaacccttcctccccgggacctatcagtgcgtctcgggaccctgccatcacaccttccacctgatcccgaataccacagcgtcgctccccgctactaacaaccaaactaacctccaccaacgccaccgtcgcgacggccacaatacatgcccatattagactatgaggccgagccacagcgacccatgctccccgctattagttacttcaatctaaccggcggagatgactgacccactggccaacaacaacgtcaacgaccttctcctggacatggacggccgcgcctcggagcagcgactcgcccaacttcgcattcgccagcagcaggagagagccgtcaaggagctgcaggatgcggtggccatccaccagtgcaagagaggcatcttctgcctggtgaaacaggccaagatctcctacgaggtcactccaaacgaccatcgcctctcctacgagctcctgcagcagcgccagaagttcacctgcctggtcggagtcaaccccatcgtcatcacccagcagtctggcgataccaaggggtgcatccactgctcctgcgactcccccgactgcgtccacactctgatcaagaccctctgcggcctccgcgacctcctccccatgaactaatcacccccttatccagtgaaataaagatcatattgatgatgattttacagaaataaaaaataatcatttgatttgaaataaagatacaatcatattgatgatttgagtttaacaaaaaaataaagaatcacttacttgaaatctgataccaggtctctgtccatgttttctgccaacaccacttcactcccctcttcccagctctggtactgcaggccccggcgggctgcaaacttcctccacacgctgaaggggatgtcaaattcctcctgtccctcaatcttcattttatcttctatcagatgtccaaaaagcgcgtccgggtggatgatgacttcgaccccgtctacccctacgatgcagacaacgcaccgaccgtgcccttcatcaacccccccttcgtctcttcagatggattccaagagaagcccctgggggtgttgtccctgcgactggccgaccccgtcaccaccaagaacggggaaatcaccctcaagctgggagagggggtggacctcgattcctcgggaaaactcatctccaacacggccaccaaggccgccgcccctctcagtttttccaacaacaccatttcccttaacatggatcaccccttttacactaaagatggaaaattatccttacaagtttctccaccattaaatatactgagaacaagcattctaaacacactagctttaggttttggatcaggtttaggactccgtggctctgccttggcagtacagttagtctctccacttacatttgatactgatggaaacataaagcttaccttagacagaggtttgcatgttacaacaggagatgcaattgaaagcaacataagctgggctaaaggtttaaaatttgaagatggagccatagcaaccaacattggaaatgggttagagtttggaagcagtagtacagaaacaggtgttgatgatgcttacccaatccaagttaaacttggatctggccttagctttgacagtacaggagccataatggctggtaacaaagaagacgataaactcactttgtggacaacacctgatccatcaccaaactgtcaaatactcgcagaaaatgatgcaaaactaacactttgcttgactaaatgtggtagtcaaatactggccactgtgtcagtcttagttgtaggaagtggaaacctaaaccccattactggcaccgtaagcagtgctcaggtgtttctacgttttgatgcaaacggtgttcttttaacagaacattctacactaaaaaaatactgggggtataggcagggagatagcatagatggcactccatataccaatgctgtaggattcatgcccaatttaaaagcttatccaaagtcacaaagttctactactaaaaataatatagtagggcaagtatacatgaatggagatgtttcaaaacctatgcttctcactataaccctcaatggtactgatgacagcaacagtacatattcaatgtcattttcatacacctggactaatggaagctatgttggagcaacatttggggctaactcttataccttctcatacatcgcccaagaatgaacactgtatcccaccctgcatgccaacccttcccaccccactctgtggaacaaactctgaaacacaaaataaaataaagttcaagtgttttattgattcaacagttttacaggattcgagcagttatttttcctccaccctcccaggacatggaatacaccaccctctccccccgcacagccttgaacatctgaatgccattggtgatggacatgcttttggtctccacgttccacacagtttcagagcgagccagtctcgggtcggtcagggagatgaaaccctccgggcactcccgcatctgcacctcacagctcaacagctgaggattgtcctcggtggtcgggatcacggttatctggaagaagcagaagagcggcggtgggaatcatagtccgcgaacgggatcggccggtggtgtcgcatcaggccccgcagcagtcgctgccgccgccgctccgtcaagctgctgctcagggggtccgggtccagggactccctcagcatgatgcccacggccctcagcatcagtcgtctggtgcggcgggcgcagcagcgcatgcggatctcgctcaggtcgctgcagtacgtgcaacacagaaccaccaggttgttcaacagtccatagttcaacacgctccagccgaaactcatcgcgggaaggatgctacccacgtggccgtcgtaccagatcctcaggtaaatcaagtggtgccccctccagaacacgctgcccacgtacatgatctccttgggcatgtggcggttcaccacctcccggtaccacatcaccctctggttgaacatgcagccccggatgatcctgcggaaccacagggccagcaccgccccgcccgccatgcagcgaagagaccccgggtcccggcaatggcaatggaggacccaccgctcgtacccgtggatcatctgggagctgaacaagtctatgttggcacagcacaggcatatgctcatgcatctcttcagcactctcaactcctcgggggtcaaaaccatatcccagggcacggggaactcttgcaggacagcgaaccccgcagaacagggcaatcctcgcacagaacttacattgtgcatggacagggtatcgcaatcaggcagcaccgggtgatcctccaccagagaagcgcgggtctcggtctcctcacagcgtggtaagggggccggccgatacgggtgatggcgggacgcggctgatcgtgttcgcgaccgtgtcatgatgcagttgctttcggacattttcgtacttgctgtagcagaacctggtccgggcgctgcacaccgatcgccggcggcggtctcggcgcttggaacgctcggtgttgaaattgtaaaacagccactctctcagaccgtgcagcagatctagggcctcaggagtgatgaagatcccatcatgcctgatggctctgatcacatcgaccaccgtggaatgggccagacccagccagatgatgcaattttgttgggtttcggtgacggcgggggagggaagaacaggaagaaccatgattaacttttaatccaaacggtctcggagtacttcaaaatgaagatcgcggagatggcacctctcgcccccgctgtgttggtggaaaataacagccaggtcaaaggtgatacggttctcgagatgttccacggtggcttccagcaaagcctccacgcgcacatccagaaacaagacaatagcgaaagcgggagggttctctaattcctcaatcatcatgttacactcctgcaccatccccagataattttcatttttccagccttgaatgattcgaactagttcgtgaggtaaatccaagccagccatgataaagagctcgcgcagagcgccctccaccggcattcttaagcacaccctcataattccaagatattctgctcctggttcacctgcagcagattgacaagcggaatatcaaaatctctgccgcgatccctgagctcctccctcagcaataactgtaagtactctttcatatcctctccgaaatttttagccataggaccaccaggaataagattagggcaagccacagtacagataaaccgaagtcctccccagtgagcattgccaaatgcaagactgctataagcatgctggctagacccggtgatatcttccagataactggacagaaaatcgcccaggcaatttttaagaaaatcaacaaaagaaaaatcctccaggtggacgtttagagcctcgggaacaacgatgaagtaaatgcaagcggtgcgttccagcatggttagttagctgatctgtagaaaaaacaaaaatgaacattaaaccatgctagcctggcgaacaggtgggtaaatcgttctctccagcaccaggcaggccacggggtctccggcgcgaccctcgtaaaaattgtcgctatgattgaaaaccatcacagagagacgttcccggtggccggcgtgaatgattcgacaagatgaatacacccccggaacattggcgtccgcgagtgaaaaaaagcgcccgaggaagcaataaggcactacaatgctcagtctcaagtccagcaaagcgatgccatgcggatgaagcacaaaattctcaggtgcgtacaaaatgtaattactcccctcctgcacaggcagcaaagcccccgatccctccaggtacacatacaaagcctcagcgtccatagcttaccgagcagcagcacacaacaggcgcaagagtcagagaaaggctgagctctaacctgtccacccgctctctgctcaatatatagcccagatctacactgacgtaaaggccaaagtctaaaaatacccgccaaataatcacacacgcccagcacacgcccagaaaccggtgacacactcaaaaaaatacgcgcacttcctcaaacgcccaaaactgccgtcatttccgggttcccacgctacgtcatcaaaacacgactttcaaattccgtcgaccgttaaaaacgtcacccgccccgcccctaacggtcgcccgtctctcagccaatcagcgccccgcatccccaaattcaaacacctcatttgcatattaacgcgcacaaaaagtttgaggtatattattgatgatgg

SEQ ID NO: 12 - DNA, 32788 bp, Artificial Sequence
  Description of Artificial Sequence: Synthetic polynucleotide
ccatcttcaataatatacctcaaactttttgtgcgcgttaatatgcaaatgaggcgtttgaatttggggaggaagggcggtgattggtcgagggatgagcgaccgttaggggcggggcgagtgacgttttgatgacgtggttgcgaggaggagccagtttgcaagttctcgtgggaaaagtgacgtcaaacgaggtgtggtttgaacacggaaatactcaattttcccgcgctctctgacaggaaatgaggtgtttctgggcggatgcaagtgaaaacgggccattttcgcgcgaaaactgaatgaggaagtgaaaatctgagtaatttcgcgtttatggcagggaggagtatttgccgagggccgagtagactttgaccgattacgtgggggtttcgattaccgtgtttttcacctaaatttccgcgtacggtgtcaaagtccggtgtttttacgtaggtgtcagctgatcgccagggtatttaaacctgcgctctccagtcaagaggccactcttgagtgccagcgagaagagttttctcctccgcgccgcgagtcagatctacactttgaaagtagggataacagggtaatgacattgattattgactagttgttaatagtaatcaattacggggtcattagttcatagcccatatatggagttccgcgttacataacttacggtaaatggcccgcctggctgaccgcccaacgacccccgcccattgacgtcaataatgacgtatgttcccatagtaacgccaatagggactttccattgacgtcaatgggtggagtatttacggtaaactgcccacttggcagtacatcaagtgtatcatatgccaagtccgccccctattgacgtcaatgacggtaaatggcccgcctggcattatgcccagtacatgaccttacgggactttcctacttggcagtacatctacgtattagtcatcgctattaccatggtgatgcggttttggcagtacaccaatgggcgtggatagcggtttgactcacggggatttccaagtctccaccccattgacgtcaatgggagtttgttttggcaccaaaatcaacgggactttccaaaatgtcgtaataaccccgccccgttgacgcaaatgggcggtaggcgtgtacggtgggaggtctatataagcagagctcgtttagtgaaccgtcagatcgcctggaacgccatccacgctgttttgacctccatagaagacagcgatcgcgccaccatggccgggatgttccaggcactgtccgaaggctgcacaccctatgatattaaccagatgctgaatgtcctgggagaccaccaggtctctggcctggagcagctggagagcatcatcaacttcgagaagctgaccgagtggacaagctccaatgtgatgcctatcctgtccccactgaccaagggcatcctgggcttcgtgtttaccctgacagtgccttctgagcggggcctgtcttgcatcagcgaggcagacgcaaccacaccagagtccgccaatctgggcgaggagatcctgtctcagctgtacctgtggccccgggtgacatatcactccccttcttacgcctatcaccagttcgagcggagagccaagtacaagagacacttcccaggctttggccagtctctgctgttcggctaccccgtgtacgtgttcggcgattgcgtgcagggcgactgggatgccatccggtttagatactgcgcaccacctggatatgcactgctgaggtgtaacgacaccaattattccgccctgctggcagtgggcgccctggagggccctcgcaatcaggattggctgggcgtgccaaggcagctggtgacacgcatgcaggccatccagaacgcaggcctgtgcaccctggtggcaatgctggaggagacaatcttctggctgcaggcctttctgatggccctgaccgacagcggccccaagacaaacatcatcgtggattcccagtacgtgatgggcatctccaagccttctttccaggagtttgtggactgggagaacgtgagcccagagctgaattccaccgatcagccattctggcaggcaggaatcctggcaaggaacctggtgcctatggtggccacagtgcagggccagaatctgaagtaccagggccagagcctggtcatcagcgcctccatcatcgtgtttaacctgctggagctggagggcgactatcgggacgatggcaacgtgtgggtgcacaccccactgagccccagaacactgaacgcctgggtgaaggccgtggaggagaagaagggcatcccagtgcacctggagctggcctccatgaccaatatggagctgatgtctagcatcgtgcaccagcaggtgaggacatacggacccgtgttcatgtgcctgggaggcctgctgaccatggtggcaggagccgtgtggctgacagtgcgggtgctggagctgttcagagccgcccagctggccaacgatgtggtgctgcagatcatggagctgtgcggagcagcctttcgccaggtgtgccacaccacagtgccatggcccaatgcctccctgacccccaagtggaacaatgagacaacacagcctcagatcgccaactgtagcgtgtacgacttcttcgtgtggctgcactactatagcgtgagggataccctgtggccccgcgtgacataccacatgaataagtacgcctatcacatgctggagaggcgcgccaagtataagagaggccctggcccaggcgcaaagtttgtggcagcatggaccctgaaggccgccgccggccccggccccggccagtatatcaaggctaacagtaagttcattggaatcacagagctgggacccggacctggataatgagtttaaactcccatttaaatgtgagggttaatgcttcgagcagacatgataagatacattgatgagtttggacaaaccacaactagaatgcagtgaaaaaaatgctttatttgtgaaatttgtgatgctattgctttatttgtaaccattataagctgcaataaacaagttaacaacaacaattgcattcattttatgtttcaggttcagggggagatgtgggaggttttttaaagcaagtaaaacctctacaaatgtggtaaaataactataacggtcctaaggtagcgagtgagtagtgttctggggcgggggaggacctgcatgagggccagaataactgaaatctgtgcttttctgtgtgttgcagcagcatgagcggaagcggctcctttgagggaggggtattcagcccttatctgacggggcgtctcccctcctgggcgggagtgcgtcagaatgtgatgggatccacggtggacggccggcccgtgcagcccgcgaactcttcaaccctgacctatgcaaccctgagctcttcgtcgttggacgcagctgccgccgcagctgctgcatctgccgccagcgccgtgcgcggaatggccatgggcgccggctactacggcactctggtggccaactcgagttccaccaataatcccgccagcctgaacgaggagaagctgttgctgctgatggcccagctcgaggccttgacccagcgcctgggcgagctgacccagcaggtggctcagctgcaggagcagacgcgggccgcggttgccacggtgaaatccaaataaaaaatgaatcaataaataaacggagacggttgttgattttaacacagagtctgaatctttatttgatttttcgcgcgcggtaggccctggaccaccggtctcgatcattgagcacccggtggatcttttccaggacccggtagaggtgggcttggatgttgaggtacatgggcatgagcccgtcccgggggtggaggtagctccattgcagggcctcgtgctcgggggtggtgttgtaaatcacccagtcatagcaggggcgcagggcatggtgttgcacaatatctttgaggaggagactgatggccacgggcagccctttggtgtaggtgtttacaaatctgttgagctgggagggatgcatgcggggggagatgaggtgcatcttggcctggatcttgagattggcgatgttaccgcccagatcccgcctggggttcatgttgtgcaggaccaccagcacggtgtatccggtgcacttggggaatttatcatgcaacttggaagggaaggcgtgaaagaatttggcgacgcctttgtgcccgcccaggttttccatgcactcatccatgatgatggcgatgggcccgtgggcggcggcctgggcaaagacgtttcgggggtcggacacatcatagttgtggtcctgggtgaggtcatcataggccattttaatgaatttggggcggagggtgccggactgggggacaaaggtaccctcgatcccgggggcgtagttcccctcacagatctgcatctcccaggctttgagctcggagggggggatcatgtccacctgcggggcgataaagaacacggtttccggggcgggggagatgagctgggccgaaagcaagttccggagcagctgggacttgccgcagccggtggggccgtagatgaccccgatgaccggctgcaggtggtagttgagggagagacagctgccgtcctcccggaggaggggggccacctcgttcatcatctcgcgcacgtgcatgttctcgcgcaccagttccgccaggaggcgctctccccccagggataggagctcctggagcgaggcgaagtttttcagcggcttgagtccgtcggccatgggcattttggagagggtttgttgcaagagttccaggcggtcccagagctcggtgatgtgctctacggcatctcgatccagcagacctcctcgtttcgcgggttgggacggctgcgggagtagggcaccagacgatgggcgtccagcgcagccagggtccggtccttccagggtcgcagcgtccgcgtcagggtggtctccgtcacggtgaaggggtgcgcgccgggctgggcgcttgcgagggtgcgcttcaggctcatccggctggtcgaaaaccgctcccgatcggcgccctgcgcgtcggccaggtagcaattgaccatgagttcgtagttgagcgcctcggccgcgtggcctttggcgcggagcttacctttggaagtctgcccgcaggcgggacagaggagggacttgagggcgtagagcttgggggcgaggaagacggactcgggggcgtaggcgtccgcgccgcagtgggcgcagacggtctcgcactccacgagccaggtgaggtcgggctggtcggggtcaaaaaccagtttcccgccgttctttttgatgcgtttcttacctttggtctccatgagctcgtgtccccgctgggtgacaaagaggctgtccgtgtccccgtagaccgactttatgggccggtcctcgagcggtgtgccgcggtcctcctcgtagaggaaccccgcccactccgagacgaaagcccgggtccaggccagcacgaaggaggccacgtgggacgggtagcggtcgttgtccaccagcgggtccaccttttccagggtatgcaaacacatgtccccctcgtccacatccaggaaggtgattggcttgtaagtgtaggccacgtgaccgggggtcccggccgggggggtataaaagggtgcgggtccctgctcgtcctcactgtcttccggatcgctgtccaggagcgccagctgttggggtaggtattccctctcgaaggcgggcatgacctcggcactcaggttgtcagtttctagaaacgaggaggatttgatattgacggtgccggcggagatgcctttcaagagcccctcgtccatctggtcagaaaagacgatctttttgttgtcgagcttggtggcgaaggagccgtagagggcgttggagaggagcttggcgatggagcgcatggtctggtttttttccttgtcggcgcgctccttggcggcgatgttgagctgcacgtactcgcgcgccacgcacttccattcggggaagacggtggtcagctcgtcgggcacgattctgacctgccagccccgattatgcagggtgatgaggtccacactggtggccacctcgccgcgcaggggctcattagtccagcagaggcgtccgcccttgcgcgagcagaaggggggcagggggtccagcatgacctcgtcgggggggtcggcatcgatggtgaagatgccgggcaggaggtcggggtcaaagtagctgatggaagtggccagatcgtccagggcagcttgccattcgcgcacggccagcgcgctctcgtagggactgaggggcgtgccccagggcatgggatgggtaagcgcggaggcgtacatgccgcagatgtcgtagacgtagaggggctcctcgaggatgccgatgtaggtggggtagcagcgccccccgcggatgctggcgcgcacgtagtcatacagctcgtgcgagggggcgaggagccccgggcccaggttggtgcgactgggcttttcggcgcggtagacgatctggcggaaaatggcatgcgagttggaggagatggtgggcctttggaagatgttgaagtgggcgtggggcagtccgaccgagtcgcggatgaagtgggcgtaggagtcttgcagcttggcgacgagctcggcggtgactaggacgtccagagcgcagtagtcgagggtctcctggatgatgtcatacttgagctgtcccttttgtttccacagctcgcggttgagaaggaactcttcgcggtccttccagtactcttcgagggggaacccgtcctgatctgcacggtaagagcctagcatgtagaactggttgacggccttgtaggcgcagcagcccttctccacggggagggcgtaggcctgggcggccttgcgcagggaggtgtgcgtgagggcgaaagtgtccctgaccatgaccttgaggaactggtgcttgaagtcgatatcgtcgcagcccccctgctcccagagctggaagtccgtgcgcttcttgtaggcggggttgggcaaagcgaaagtaacatcgttgaagaggatcttgcccgcgcggggcataaagttgcgagtgatgcggaaaggttggggcacctcggcccggttgttgatgacctgggcggcgagcacgatctcgtcgaagccgttgatgttgtggcccacgatgtagagttccacgaatcgcggacggcccttgacgtggggcagtttcttgagctcctcgtaggtgagctcgtcggggtcgctgagcccgtgctgctcgagcgcccagtcggcgagatgggggttggcgcggaggaaggaagtccagagatccacggccagggcggtttgcagacggtcccggtactgacggaactgctgcccgacggccattttttcgggggtgacgcagtagaaggtgcgggggtccccgtgccagcgatcccatttgagctggagggcgagatcgagggcgagctcgacgagccggtcgtccccggagagtttcatgaccagcatgaaggggacgagctgcttgccgaaggaccccatccaggtgtaggtttccacatcgtaggtgaggaagagcctttcggtgcgaggatgcgagccgatggggaagaactggatctcctgccaccaattggaggaatggctgttgatgtgatggaagtagaaatgccgacggcgcgccgaacactcgtgcttgtgtttatacaagcggccacagtgctcgcaacgctgcacgggatgcacgtgctgcacgagctgtacctgagttcctttgacgaggaatttcagtgggaagtggagtcgtggcgcctgcatctcgtgctgtactacgtcgtggtggtcggcctggccctcttctgcctcgatggtggtcatgctgacgagcccgcgcgggaggcaggtccagacctcggcgcgagcgggtcggagagcgaggacgagggcgcgcaggccggagctgtccagggtcctgagacgctgcggagtcaggtcagtgggcagcggcggcgcgcggttgacttgcaggagtttttccagggcgcgcgggaggtccagatggtacttgatctccaccgcgccattggtggcgacgtcgatggcttgcagggtcccgtgcccctggggtgtgaccaccgtcccccgtttcttcttgggcggctggggcgacgggggcggtgcctcttccatggttagaagcggcggcgaggacgcgcgccgggcggcaggggcggctcggggcccggaggcaggggcggcaggggcacgtcggcgccgcgcgcgggtaggttctggtactgcgcccggagaagactggcgtgagcgacgacgcgacggttgacgtcctggatctgacgcctctgggtgaaggccacgggacccgtgagtttgaacctgaaagagagttcgacagaatcaatctcggtatcgttgacggcggcctgccgcaggatctcttgcacgtcgcccgagttgtcctggtaggcgatctcggtcatgaactgctcgatctcctcctcttgaaggtctccgcggccggcgcgctccacggtggccgcgaggtcgttggagatgcggcccatgagctgcgagaaggcgttcatgcccgcctcgttccagacgcggctgtagaccacgacgccctcgggatcgcgggcgcgcatgaccacctgggcgaggttgagctccacgtggcgcgtgaagaccgcgtagttgcagaggcgctggtagaggtagttgagcgtggtggcgatgtgctcggtgacgaagaaatacatgatccagcggcggagcggcatctcgctgacgtcgcccagcgcctccaaacgttccatggcctcgtaaaagtccacggcgaagttgaaaaactgggagttgcgcgccgagacggtcaactcctcctccagaagacggatgagctcggcgatggtggcgcgcacctcgcgctcgaaggcccccgggagttcctccacttcctcttcttcctcctccactaacatctcttctacttcctcctcaggcggcagtggtggcgggggagggggcctgcgtcgccggcggcgcacgggcagacggtcgatgaagcgctcgatggtctcgccgcgccggcgtcgcatggtctcggtgacggcgcgcccgtcctcgcggggccgcagcgtgaagacgccgccgcgcatctccaggtggccgggggggtccccgttgggcagggagagggcgctgacgatgcatcttatcaattgccccgtagggactccgcgcaaggacctgagcgtctcgagatccacgggatctgaaaaccgctgaacgaaggcttcgagccagtcgcagtcgcaaggtaggctgagcacggtttcttctggcgggtcatgttggttgggagcggggcgggcgatgctgctggtgatgaagttgaaataggcggttctgagacggcggatggtggcgaggagcaccaggtctttgggcccggcttgctggatgcgcagacggtcggccatgccccaggcgtggtcctgacacctggccaggtccttgtagtagtcctgcatgagccgctccacgggcacctcctcctcgcccgcgcggccgtgcatgcgcgtgagcccgaagccgcgctggggctggacgagcgccaggtcggcgacgacgcgctcggcgaggatggcttgctggatctgggtgagggtggtctggaagtcatcaaagtcgacgaagcggtggtaggctccggtgttgatggtgtaggagcagttggccatgacggaccagttgacggtctggtggcccggacgcacgagctcgtggtacttgaggcgcgagtaggcgcgcgtgtcgaagatgtagtcgttgcaggtgcgcaccaggtactggtagccgatgaggaagtgcggcggcggctggcggtagagcggccatcgctcggtggcgggggcgccgggcgcgaggtcctcgagcatggtgcggtggtagccgtagatgtacctggacatccaggtgatgccggcggcggtggtggaggcgcgcgggaactcgcggacgcggttccagatgttgcgcagcggcaggaagtagttcatggtgggcacggtctggcccgtgaggcgcgcgcagtcgtggatgctctatacgggcaaaaacgaaagcggtcagcggctcgactccgtggcctggaggctaagcgaacgggttgggctgcgcgtgtaccccggttcgaatctcgaatcaggctggagccgcagctaacgtggtattggcactcccgtctcgacccaagcctgcaccaaccctccaggatacggaggcgggtcgttttgcaacttttttttggaggccggatgagactagtaagcgcggaaagcggccgaccgcgatggctcgctgccgtagtctggagaagaatcgccagggttgcgttgcggtgtgccccggttcgaggccggccggattccgcggctaacgagggcgtggctgccccgtcgtttccaagaccccatagccagccgacttctccagttacggagcgagcccctcttttgttttgtttgtttttgccagatgcatcccgtactgcggcagatgcgcccccaccaccctccaccgcaacaacagccccctccacagccggcgcttctgcccccgccccagcagcaacttccagccacgaccgccgcggccgccgtgagcggggctggacagagttatgatcaccagctggccttggaagagggcgaggggctggcgcgcctgggggcgtcgtcgccggagcggcacccgcgcgtgcagatgaaaagggacgctcgcgaggcctacgtgcccaagcagaacctgttcagagacaggagcggcgaggagcccgaggagatgcgcgcggcccggttccacgcggggcgggagctgcggcgcggcctggaccgaaagagggtgctgagggacgaggatttcgaggcggacgagctgacggggatcagccccgcgcgcgcgcacgtggccgcggccaacctggtcacggcgtacgagcagaccgtgaaggaggagagcaacttccaaaaatccttcaacaaccacgtgcgcaccctgatcgcgcgcgaggaggtgaccctgggcctgatgcacctgtgggacctgctggaggccatcgtgcagaaccccaccagcaagccgctgacggcgcagctgttcctggtggtgcagcatagtcgggacaacgaagcgttcagggaggcgctgctgaatatcaccgagcccgagggccgctggctcctggacctggtgaacattctgcagagcatcgtggtgcaggagcgcgggctgccgctgtccgagaagctggcggccatcaacttctcggtgctgagtttgggcaagtactacgctaggaagatctacaagaccccgtacgtgcccatagacaaggaggtgaagatcgacgggttttacatgcgcatgaccctgaaagtgctgaccctgagcgacgatctgggggtgtaccgcaacgacaggatgcaccgtgcggtgagcgccagcaggcggcgcgagctgagcgaccaggagctgatgcatagtctgcagcgggccctgaccggggccgggaccgagggggagagctactttgacatgggcgcggacctgcactggcagcccagccgccgggccttggaggcggcggcaggaccctacgtagaagaggtggacgatgaggtggacgaggagggcgagtacctggaagactgatggcgcgaccgtatttttgctagatgcaacaacaacagccacctcctgatcccgcgatgcgggcggcgctgcagagccagccgtccggcattaactcctcggacgattggacccaggccatgcaacgcatcatggcgctgacgacccgcaaccccgaagcctttagacagcagccccaggccaaccggctctcggccatcctggaggccgtggtgccctcgcgctccaaccccacgcacgagaaggtcctggccatcgtgaacgcgctggtggagaacaaggccatccgcggcgacgaggccggcctggtgtacaacgcgctgctggagcgcgtggcccgctacaacagcaccaacgtgcagaccaacctggaccgcatggtgaccgacgtgcgcgaggccgtggcccagcgcgagcggttccaccgcgagtccaacctgggatccatggtggcgctgaacgccttcctcagcacccagcccgccaacgtgccccggggccaggaggactacaccaacttcatcagcgccctgcgcctgatggtgaccgaggtgccccagagcgaggtgtaccagtccgggccggactacttcttccagaccagtcgccagggcttgcagaccgtgaacctgagccaggctttcaagaacttgcagggcctgtggggcgtgcaggccccggtcggggaccgcgcgacggtgtcgagcctgctgacgccgaactcgcgcctgctgctgctgctggtggcccccttcacggacagcggcagcatcaaccgcaactcgtacctgggctacctgattaacctgtaccgcgaggccatcggccaggcgcacgtggacgagcagacctaccaggagatcacccacgtgagccgcgccctgggccaggacgacccgggcaacctggaagccaccctgaactttttgctgaccaaccggtcgcagaagatcccgccccagtacgcgctcagcaccgaggaggagcgcatcctgcgttacgtgcagcagagcgtgggcctgttcctgatgcaggagggggccacccccagcgccgcgctcgacatgaccgcgcgcaacatggagcccagcatgtacgccagcaaccgcccgttcatcaataaactgatggactacttgcatcgggcggccgccatgaactctgactatttcaccaacgccatcctgaatccccactggctcccgccgccggggttctacacgggcgagtacgacatgcccgaccccaatgacgggttcctgtgggacgatgtggacagcagcgtgttctccccccgaccgggtgctaacgagcgccccttgtggaagaaggaaggcagcgaccgacgcccgtcctcggcgctgtccggccgcgagggtgctgccgcggcggtgcccgaggccgccagtcctttcccgagcttgcccttctcgctgaacagtatccgcagcagcgagctgggcaggatcacgcgcccgcgcttgctgggcgaagaggagtacttgaatgactcgctgttgagacccgagcgggagaagaacttccccaataacgggatagaaagcctggtggacaagatgagccgctggaagacgtatgcgcaggagcacagggacgatccccgggcgtcgcagggggccacgagccggggcagcgccgcccgtaaacgccggtggcacgacaggcagcggggacagatgtgggacgatgaggactccgccgacgacagcagcgtgttggacttgggtgggagtggtaacccgttcgctcacctgcgcccccgtatcgggcgcatgatgtaagagaaaccgaaaataaatgatactcaccaaggccatggcgaccagcgtgcgttcgtttcttctctgttgttgttgtatctagtatgatgaggcgtgcgtacccggagggtcctcctccctcgtacgagagcgtgatgcagcaggcgatggcggcggcggcgatgcagcccccgctggaggctccttacgtgcccccgcggtacctggcgcctacggaggggcggaacagcattcgttactcggagctggcacccttgtacgataccacccggttgtacctggtggacaacaagtcggcggacatcgcctcgctgaactaccagaacgaccacagcaacttcctgaccaccgtggtgcagaacaatgacttcacccccacggaggccagcacccagaccatcaactttgacgagcgctcgcggtggggcggccagctgaaaaccatcatgcacaccaacatgcccaacgtgaacgagttcatgtacagcaacaagttcaaggcgcgggtgatggtctcccgcaagacccccaatggggtgacagtgacagaggattatgatggtagtcaggatgagctgaagtatgaatgggtggaatttgagctgcccgaaggcaacttctcggtgaccatgaccatcgacctgatgaacaacgccatcatcgacaattacttggcggtggggcggcagaacggggtgctggagagcgacatcggcgtgaagttcgacactaggaacttcaggctgggctgggaccccgtgaccgagctggtcatgcccggggtgtacaccaacgaggctttccatcccgatattgtcttgctgcccggctgcggggtggacttcaccgagagccgcctcagcaacctgctgggcattcgcaagaggcagcccttccaggaaggcttccagatcatgtacgaggatctggaggggggcaacatccccgcgctcctggatgtcgacgcctatgagaaaagcaaggaggatgcagcagctgaagcaactgcagccgtagctaccgcctctaccgaggtcaggggcgataattttgcaagcgccgcagcagtggcagcggccgaggcggctgaaaccgaaagtaagatagtcattcagccggtggagaaggatagcaagaacaggagctacaacgtactaccggacaagataaacaccgcctaccgcagctggtacctagcctacaactatggcgaccccgagaagggcgtgcgctcctggacgctgctcaccacctcggacgtcacctgcggcgtggagcaagtctactggtcgctgcccgacatgatgcaagacccggtcaccttccgctccacgcgtcaagttagcaactacccggtggtgggcgccgagctcctgcccgtctactccaagagcttcttcaacgagcaggccgtctactcgcagcagctgcgcgccttcacctcgcttacgcacgtcttcaaccgcttccccgagaaccagatcctcgtccgcccgcccgcgcccaccattaccaccgtcagtgaaaacgttcctgctctcacagatcacgggaccctgccgctgcgcagcagtatccggggagtccagcgcgtgaccgttactgacgccagacgccgcacctgcccctacgtctacaaggccctgggcatagtcgcgccgcgcgtcctctcgagccgcaccttctaaatgtccattctcatctcgcccagtaataacaccggttggggcctgcgcgcgcccagcaagatgtacggaggcgctcgccaacgctccacgcaacaccccgtgcgcgtgcgcgggcacttccgcgctccctggggcgccctcaagggccgcgtgcggtcgcgcaccaccgtcgacgacgtgatcgaccaggtggtggccgacgcgcgcaactacacccccgccgccgcgcccgtctccaccgtggacgccgtcatcgacagcgtggtggccgacgcgcgccggtacgcccgcgccaagagccggcggcggcgcatcgcccggcggcaccggagcacccccgccatgcgcgcggcgcgagccttgctgcgcagggccaggcgcacgggacgcagggccatgctcagggcggccagacgcgcggcttcaggcgccagcgccggcaggacccggagacgcgcggccacggcggcggcagcggccatcgccagcatgtcccgcccgcggcgagggaacgtgtactgggtgcgcgacgccgccaccggtgtgcgcgtgcccgtgcgcacccgcccccctcgcacttgaagatgttcacttcgcgatgttgatgtgtcccagcggcgaggaggatgtccaagcgcaaattcaaggaagagatgctccaggtcatcgcgcctgagatctacggccctgcggtggtgaaggaggaaagaaagccccgcaaaatcaagcgggtcaaaaaggacaaaaaggaagaagaaagtgatgtggacggattggtggagtttgtgcgcgagttcgccccccggcggcgcgtgcagtggcgcgggcggaaggtgcaaccggtgctgagacccggcaccaccgtggtcttcacgcccggcgagcgctccggcaccgcttccaagcgctcctacgacgaggtgtacggggatgatgatattctggagcaggcggccgagcgcctgggcgagtttgcttacggcaagcgcagccgttccgcaccgaaggaagaggcggtgtccatcccgctggaccacggcaaccccacgccgagcctcaagcccgtgaccttgcagcaggtgctgccgaccgcggcgccgcgccgggggttcaagcgcgagggcgaggatctgtaccccaccatgcagctgatggtgcccaagcgccagaagctggaagacgtgctggagaccatgaaggtggacccggacgtgcagcccgaggtcaaggtgcggcccatcaagcaggtggccccgggcctgggcgtgcagaccgtggacatcaagattcccacggagcccatggaaacgcagaccgagcccatgatcaagcccagcaccagcaccatggaggtgcagacggatccctggatgccatcggctcctagtcgaagaccccggcgcaagtacggcgcggccagcctgctgatgcccaactacgcgctgcatccttccatcatccccacgccgggctaccgcggcacgcgcttctaccgcggtcataccagcagccgccgccgcaagaccaccactcgccgccgccgtcgccgcaccgccgctgcaaccacccctgccgccctggtgcggagagtgtaccgccgcggccgcgcacctctgaccctgccgcgcgcgcgctaccacccgagcatcgccatttaaactttcgcctgctttgcagatcaatggccctcacatgccgccttcgcgttcccattacgggctaccgaggaagaaaaccgcgccgtagaaggctggcggggaacgggatgcgtcgccaccaccaccggcggcggcgcgccatcagcaagcggttggggggaggcttcctgcccgcgctgatccccatcatcgccgcggcgatcggggcgatccccggcattgcttccgtggcggtgcaggcctctcagcgccactgagacacacttggaaacatcttgtaataaaccaatggactctgacgctcctggtcctgtgatgtgttttcgtagacagatggaagacatcaatttttcgtccctggctccgcgacacggcacgcggccgttcatgggcacctggagcgacatcggcaccagccaactgaacgggggcgccttcaattggagcagtctctggagcgggcttaagaatttcgggtccacgcttaaaacctatggcagcaaggcgtggaacagcaccacagggcaggcgctgagggataagctgaaagagcagaacttccagcagaaggtggtcgatgggctcgcctcgggcatcaacggggtggtggacctggccaaccaggccgtgcagcggcagatcaacagccgcctggacccggtgccgcccgccggctccgtggagatgccgcaggtggaggaggagctgcctcccctggacaagcggggcgagaagcgaccccgccccgatgcggaggagacgctgctgacgcacacggacgagccgcccccgtacgaggaggcggtgaaactgggtctgcccaccacgcggcccatcgcgcccctggccaccggggtgctgaaacccgaaaagcccgcgaccctggacttgcctcctccccagccttcccgcccctctacagtggctaagcccctgccgccggtggccgtggcccgcgcgcgacccgggggcaccgcccgccctcatgcgaactggcagagcactctgaacagcatcgtgggtctgggagtgcagagtgtgaagcgccgccgctgctattaaacctaccgtagcgcttaacttgcttgtctgtgtgtgtatgtattatgtcgccgccgccgctgtccaccagaaggaggagtgaagaggcgcgtcgccgagttgcaagatggccaccccatcgatgctgccccagtgggcgtacatgcacatcgccggacaggacgcttcggagtacctgagtccgggtctggtgcagtttgcccgcgccacagacacctacttcagtctggggaacaagtttaggaaccccacggtggcgcccacgcacgatgtgaccaccgaccgcagccagcggctgacgctgcgcttcgtgcccgtggaccgcgaggacaacacctactcgtacaaagtgcgctacacgctggccgtgggcgacaaccgcgtgctggacatggccagcacctactttgacatccgcggcgtgctggatcggggccctagcttcaaaccctactccggcaccgcctacaacagtctggcccccaagggagcacccaacacttgtcagtggacatataaagccgatggtgaaactgccacagaaaaaacctatacatatggaaatgcacccgtgcagggcattaacatcacaaaagatggtattcaacttggaactgacaccgatgatcagccaatctacgcagataaaacctatcagcctgaacctcaagtgggtgatgctgaatggcatgacatcactggtactgatgaaaagtatggaggcagagctcttaagcctgataccaaaatgaagccttgttatggttcttttgccaagcctactaataaagaaggaggtcaggcaaatgtgaaaacaggaacaggcactactaaagaatatgacatagacatggctttctttgacaacagaagtgcggctgctgctggcctagctccagaaattgttttgtatactgaaaatgtggatttggaaactccagatacccatattgtatacaaagcaggcacagatgacagcagctcttctattaatttgggtcagcaagccatgcccaacagacctaactacattggtttcagagacaactttatcgggctcatgtactacaacagcactggcaatatgggggtgctggccggtcaggcttctcagctgaatgctgtggttgacttgcaagacagaaacaccgagctgtcctaccagctcttgcttgactctctgggtgacagaacccggtatttcagtatgtggaatcaggcggtggacagctatgatcctgatgtgcgcattattgaaaatcatggtgtggaggatgaacttcccaactattgtttccctctggatgctgttggcagaacagatacttatcagggaattaaggctaatggaactgatcaaaccacatggaccaaagatgacagtgtcaatgatgctaatgagataggcaagggtaatccattcgccatggaaatcaacatccaagccaacctgtggaggaacttcctctacgccaacgtggccctgtacctgcccgactcttacaagtacacgccggccaatgttaccctgcccaccaacaccaacacctacgattacatgaacggccgggtggtggcgccctcgctggtggactcctacatcaacatcggggcgcgctggtcgctggatcccatggacaacgtgaaccccttcaaccaccaccgcaatgcggggctgcgctaccgctccatgctcctgggcaacgggcgctacgtgcccttccacatccaggtgccccagaaatttttcgccatcaagagcctcctgctcctgcccgggtcctacacctacgagtggaacttccgcaaggacgtcaacatgatcctgcagagctccctcggcaacgacctgcgcacggacggggcctccatctccttcaccagcatcaacctctacgccaccttcttccccatggcgcacaacacggcctccacgctcgaggccatgctgcgcaacgacaccaacgaccagtccttcaacgactacctctcggcggccaacatgctctaccccatcccggccaacgccaccaacgtgcccatctccatcccctcgcgcaactgggccgccttccgcggctggtccttcacgcgtctcaagaccaaggagacgccctcgctgggctccgggttcgacccctacttcgtctactcgggctccatcccctacctcgacggcaccttctacctcaaccacaccttcaagaaggtctccatcaccttcgactcctccgtcagctggcccggcaacgaccggctcctgacgcccaacgagttcgaaatcaagcgcaccgtcgacggcgagggctacaacgtggcccagtgcaacatgaccaaggactggttcctggtccagatgctggcccactacaacatcggctaccagggcttctacgtgcccgagggctacaaggaccgcatgtactccttcttccgcaacttccagcccatgagccgccaggtggtggacgaggtcaactacaaggactaccaggccgtcaccctggcctaccagcacaacaactcgggcttcgtcggctacctcgcgcccaccatgcgccagggccagccctaccccgccaactacccctacccgctcatcggcaagagcgccgtcaccagcgtcacccagaaaaagttcctctgcgacagggtcatgtggcgcatccccttctccagcaacttcatgtccatgggcgcgctcaccgacctcggccagaacatgctctatgccaactccgcccacgcgctagacatgaatttcgaagtcgaccccatggatgagtccacccttctctatgttgtcttcgaagtcttcgacgtcgtccgagtgcaccagccccaccgcggcgtcatcgaggccgtctacctgcgcacccccttctcggccggtaacgccaccacctaagctcttgcttcttgcaagccatggccgcgggctccggcgagcaggagctcagggccatcatccgcgacctgggctgcgggccctacttcctgggcaccttcgataagcgcttcccgggattcatggccccgcacaagctggcctgcgccatcgtcaacacggccggccgcgagaccgggggcgagcactggctggccttcgcctggaacccgcgctcgaacacctgctacctcttcgaccccttcgggttctcggacgagcgcctcaagcagatctaccagttcgagtacgagggcctgctgcgccgcagcgccctggccaccgaggaccgctgcgtcaccctggaaaagtccacccagaccgtgcagggtccgcgctcggccgcctgcgggctcttctgctgcatgttcctgcacgccttcgtgcactggcccgaccgccccatggacaagaaccccaccatgaacttgctgacgggggtgcccaacggcatgctccagtcgccccaggtggaacccaccctgcgccgcaaccaggaggcgctctaccgcttcctcaactcccactccgcctactttcgctcccaccgcgcgcgcatcgagaaggccaccgccttcgaccgcatgaatcaagacatgtaaaccgtgtgtgtatgttaaatgtctttaataaacagcactttcatgttacacatgcatctgagatgatttatttagaaatcgaaagggttctgccgggtctcggcatggcccgcgggcagggacacgttgcggaactggtacttggccagccacttgaactcggggatcagcagtttgggcagcggggtgtcggggaaggagtcggtccacagcttccgcgtcagttgcagggcgcccagcaggtcgggcgcggagatcttgaaatcgcagttgggacccgcgttctgcgcgcgggagttgcggtacacggggttgcagcactggaacaccatcagggccgggtgcttcacgctcgccagcaccgtcgcgtcggtgatgctctccacgtcgaggtcctcggcgttggccatcccgaagggggtcatcttgcaggtctgccttcccatggtgggcacgcacccgggcttgtggttgcaatcgcagtgcagggggatcagcatcatctgggcctggtcggcgttcatccccgggtacatggccttcatgaaagcctccaattgcctgaacgcctgctgggccttggctccctcggtgaagaagaccccgcaggacttgctagagaactggttggtggcgcacccggcgtcgtgcacgcagcagcgcgcgtcgttgttggccagctgcaccacgctgcgcccccagcggttctgggtgatcttggcccggtcggggttctccttcagcgcgcgctgcccgttctcgctcgccacatccatctcgatcatgtgctccttctggatcatggtggtcccgtgcaggcaccgcagcttgccctcggcctcggtgcacccgtgcagccacagcgcgcacccggtgcactcccagttcttgtgggcgatctgggaatgcgcgtgcacgaagccctgcaggaagcggcccatcatggtggtcagggtcttgttgctagtgaaggtcagcggaatgccgcggtgctcctcgttgatgtacaggtggcagatgcggcggtacacctcgccctgctcgggcatcagctggaagttggctttcaggtcggtctccacgcggtagcggtccatcagcatagtcatgatttccatacccttctcccaggccgagacgatgggcaggctcatagggttcttcaccatcatcttagcgctagcagccgcggccagggggtcgctctcgtccagggtctcaaagctccgcttgccgtccttctcggtgatccgcaccggggggtagctgaagcccacggccgccagctcctcctcggcctgtctttcgtcctcgctgtcctggctgacgtcctgcaggaccacatgcttggtcttgcggggtttcttcttgggcggcagcggcggcggagatgttggagatggcgagggggagcgcgagttctcgctcaccactactatctcttcctcttcttggtccgaggccacgcggcggtaggtatgtctcttcgggggcagaggcggaggcgacgggctctcgccgccgcgacttggcggatggctggcagagccccttccgcgttcgggggtgcgctcccggcggcgctctgactgacttcctccgcggccggccattgtgttctcctagggaggaacaacaagcatggagactcagccatcgccaacctcgccatctgcccccaccgccgacgagaagcagcagcagcagaatgaaagcttaaccgccccgccgcccagccccgccacctccgacgcggccgtcccagacatgcaagagatggaggaatccatcgagattgacctgggctatgtgacgcccgcggagcacgaggaggagctggcagtgcgcttttcacaagaagagatacaccaagaacagccagagcaggaagcagagaatgagcagagtcaggctgggctcgagcatgacggcgactacctccacctgagcgggggggaggacgcgctcatcaagcatctggcccggcaggccaccatcgtcaaggatgcgctgctcgaccgcaccgaggtgcccctcagcgtggaggagctcagccgcgcctacgagttgaacctcttctcgccgcgcgtgccccccaagcgccagcccaatggcacctgcgagcccaacccgcgcctcaacttctacccggtcttcgcggtgcccgaggccctggccacctaccacatctttttcaagaaccaaaagatccccgtctcctgccgcgccaaccgcacccgcgccgacgcccttttcaacctgggtcccggcgcccgcctacctgatatcgcctccttggaagaggttcccaagatcttcgagggtctgggcagcgacgagactcgggccgcgaacgctctgcaaggagaaggaggagagcatgagcaccacagcgccctggtcgagttggaaggcgacaacgcgcggctggcggtgctcaaacgcacggtcgagctgacccatttcgcctacccggctctgaacctgccccccaaagtcatgagcgcggtcatggaccaggtgctcatcaagcgcgcgtcgcccatctccgaggacgagggcatgcaagactccgaggagggcaagcccgtggtcagcgacgagcagctggcccggtggctgggtcctaatgctagtccccagagtttggaagagcggcgcaaactcatgatggccgtggtcctggtgaccgtggagctggagtgcctgcgccgcttcttcgccgacgcggagaccctgcgcaaggtcgaggagaacctgcactacctcttcaggcacgggttcgtgcgccaggcctgcaagatctccaacgtggagctgaccaacctggtctcctacatgggcatcttgcacgagaaccgcctggggcagaacgtgctgcacaccaccctgcgcggggaggcccggcgcgactacatccgcgactgcgtctacctctacctctgccacacctggcagacgggcatgggcgtgtggcagcagtgtctggaggagcagaacctgaaagagctctgcaagctcctgcagaagaacctcaagggtctgtggaccgggttcgacgagcgcaccaccgcctcggacctggccgacctcattttccccgagcgcctcaggctgacgctgcgcaacggcctgcccgactttatgagccaaagcatgttgcaaaactttcgctctttcatcctcgaacgctccggaatcctgcccgccacctgctccgcgctgccctcggacttcgtgccgctgaccttccgcgagtgccccccgccgctgtggagccactgctacctgctgcgcctggccaactacctggcctaccactcggacgtgatcgaggacgtcagcggcgagggcctgctcgagtgccactgccgctgcaacctctgcacgccgcaccgctccctggcctgcaacccccagctgctgagcgagacccagatcatcggcaccttcgagttgcaagggcccagcgaaggcgagggttcagccgccaaggggggtctgaaactcaccccggggctgtggacctcggcctacttgcgcaagttcgtgcccgaggactaccatcccttcgagatcaggttctacgaggaccaatcccatccgcccaaggccgagctgtcggcctgcgtcatcacccagggggcgatcctggcccaattgcaagccatccagaaatcccgccaagaattcttgctgaaaaagggccgcggggtctacctcgacccccagaccggtgaggagctcaaccccggcttcccccaggatgccccgaggaaacaagaagctgaaagtggagctgccgcccgtggaggatttggaggaagactgggagaacagcagtcaggcagaggaggaggagatggaggaagactgggacagcactcaggcagaggaggacagcctgcaagacagtctggaggaagacgaggaggaggcagaggaggaggtggaagaagcagccgccgccagaccgtcgtcctcggcgggggagaaagcaagcagcacggataccatctccgctccgggtcggggtcccgctcgaccacacagtagatgggacgagaccggacgattcccgaaccccaccacccagaccggtaagaaggagcggcagggatacaagtcctggcgggggcacaaaaacgccatcgtctcctgcttgcaggcctgcgggggcaacatctccttcacccggcgctacctgctcttccaccgcggggtgaactttccccgcaacatcttgcattactaccgtcacctccacagcccctactacttccaagaagaggcagcagcagcagaaaaagaccagcagaaaaccagcagctagaaaatccacagcggcggcagcaggtggactgaggatcgcggcgaacgagccggcgcaaacccgggagctgaggaaccggatctttcccaccctctatgccatcttccagcagagtcgggggcaggagcaggaactgaaagtcaagaaccgttctctgcgctcgctcacccgcagttgtctgtatcacaagagcgaagaccaacttcagcgcactctcgaggacgccgaggctctcttcaacaagtactgcgcgctcactcttaaagagtagcccgcgcccgcccagtcgcagaaaaaggcgggaattacgtcacctgtgcccttcgccctagccgcctccacccatcatcatgagcaaagagattcccacgccttacatgtggagctaccagccccagatgggcctggccgccggtgccgcccaggactactccacccgcatgaattggctcagcgccgggcccgcgatgatctcacgggtgaatgacatccgcgcccaccgaaaccagatactcctagaacagtcagcgctcaccgccacgccccgcaatcacctcaatccgcgtaattggcccgccgccctggtgtaccaggaaattccccagcccacgaccgtactacttccgcgagacgcccaggccgaagtccagctgactaactcaggtgtccagctggcgggcggcgccaccctgtgtcgtcaccgccccgctcagggtataaagcggctggtgatccggggcagaggcacacagctcaacgacgaggtggtgagctcttcgctgggtctgcgacctgacggagtcttccaactcgccggatcggggagatcttccttcacgcctcgtcaggccgtcctgactttggagagttcgtcctcgcagccccgctcgggtggcatcggcactctccagttcgtggaggagttcactccctcggtctacttcaaccccttctccggctcccccggccactacccggacgagttcatcccgaacttcgacgccatcagcgagtcggtggacggctacgattgaatgtcccatggtggcgcagctgacctagctcggcttcgacacctggaccactgccgccgcttccgctgcttcgctcgggatctcgccgagtttgcctactttgagctgcccgaggagcaccctcagggcccggcccacggagtgcggatcgtcgtcgaagggggcctcgactcccacctgcttcggatcttcagccagcgtccgatcctggtcgagcgcgagcaaggacagacccttctgactctgtactgcatctgcaaccaccccggcctgcatgaaagtctttgttgtctgctgtgtactgagtataataaaagctgagatcagcgactactccggacttccgtgtgttcctgaatccatcaaccagtctttgttcttcaccgggaacgagaccgagctccagctccagtgtaagccccacaagaagtacctcacctggctgttccagggctccccgatcgccgttgtcaaccactgcgacaacgacggagtcctgctgagcggccctgccaaccttactttttccacccgcagaagcaagctccagctcttccaacccttcctccccgggacctatcagtgcgtctcgggaccctgccatcacaccttccacctgatcccgaataccacagcgtcgctccccgctactaacaaccaaactaacctccaccaacgccaccgtcgcgacggccacaatacatgcccatattagactatgaggccgagccacagcgacccatgctccccgctattagttacttcaatctaaccggcggagatgactgacccactggccaacaacaacgtcaacgaccttctcctggacatggacggccgcgcctcggagcagcgactcgcccaacttcgcattcgccagcagcaggagagagccgtcaaggagctgcaggatgcggtggccatccaccagtgcaagagaggcatcttctgcctggtgaaacaggccaagatctcctacgaggtcactccaaacgaccatcgcctctcctacgagctcctgcagcagcgccagaagttcacctgcctggtcggagtcaaccccatcgtcatcacccagcagtctggcgataccaaggggtgcatccactgctcctgcgactcccccgactgcgtccacactctgatcaagaccctctgcggcctccgcgacctcctccccatgaactaatcacccccttatccagtgaaataaagatcatattgatgatgattttacagaaataaaaaataatcatttgatttgaaataaagatacaatcatattgatgatttgagtttaacaaaaaaataaagaatcacttacttgaaatctgataccaggtctctgtccatgttttctgccaacaccacttcactcccctcttcccagctctggtactgcaggccccggcgggctgcaaacttcctccacacgctgaaggggatgtcaaattcctcctgtccctcaatcttcattttatcttctatcagatgtccaaaaagcgcgtccgggtggatgatgacttcgaccccgtctacccctacgatgcagacaacgcaccgaccgtgcccttcatcaacccccccttcgtctcttcagatggattccaagagaagcccctgggggtgttgtccctgcgactggccgaccccgtcaccaccaagaacggggaaatcaccctcaagctgggagagggggtggacctcgattcctcgggaaaactcatctccaacacggccaccaaggccgccgcccctctcagtttttccaacaacaccatttcccttaacatggatcaccccttttacactaaagatggaaaattatccttacaagtttctccaccattaaatatactgagaacaagcattctaaacacactagctttaggttttggatcaggtttaggactccgtggctctgccttggcagtacagttagtctctccacttacatttgatactgatggaaacataaagcttaccttagacagaggtttgcatgttacaacaggagatgcaattgaaagcaacataagctgggctaaaggtttaaaatttgaagatggagccatagcaaccaacattggaaatgggttagagtttggaagcagtagtacagaaacaggtgttgatgatgcttacccaatccaagttaaacttggatctggccttagctttgacagtacaggagccataatggctggtaacaaagaagacgataaactcactttgtggacaacacctgatccatcaccaaactgtcaaatactcgcagaaaatgatgcaaaactaacactttgcttgactaaatgtggtagtcaaatactggccactgtgtcagtcttagttgtaggaagtggaaacctaaaccccattactggcaccgtaagcagtgctcaggtgtttctacgttttgatgcaaacggtgttcttttaacagaacattctacactaaaaaaatactgggggtataggcagggagatagcatagatggcactccatataccaatgctgtaggattcatgcccaatttaaaagcttatccaaagtcacaaagttctactactaaaaataatatagtagggcaagtatacatgaatggagatgtttcaaaacctatgcttctcactataaccctcaatggtactgatgacagcaacagtacatattcaatgtcattttcatacacctggactaatggaagctatgttggagcaacatttggggctaactcttataccttctcatacatcgcccaagaatgaacactgtatcccaccctgcatgccaacccttcccaccccactctgtggaacaaactctgaaacacaaaataaaataaagttcaagtgttttattgattcaacagttttacaggattcgagcagttatttttcctccaccctcccaggacatggaatacaccaccctctccccccgcacagccttgaacatctgaatgccattggtgatggacatgcttttggtctccacgttccacacagtttcagagcgagccagtctcgggtcggtcagggagatgaaaccctccgggcactcccgcatctgcacctcacagctcaacagctgaggattgtcctcggtggtcgggatcacggttatctggaagaagcagaagagcggcggtgggaatcatagtccgcgaacgggatcggccggtggtgtcgcatcaggccccgcagcagtcgctgccgccgccgctccgtcaagctgctgctcagggggtccgggtccagggactccctcagcatgatgcccacggccctcagcatcagtcgtctggtgcggcgggcgcagcagcgcatgcggatctcgctcaggtcgctgcagtacgtgcaacacagaaccaccaggttgttcaacagtccatagttcaacacgctccagccgaaactcatcgcgggaaggatgctacccacgtggccgtcgtaccagatcctcaggtaaatcaagtggtgccccctccagaacacgctgcccacgtacatgatctccttgggcatgtggcggttcaccacctcccggtaccacatcaccctctggttgaacatgcagccccggatgatcctgcggaaccacagggccagcaccgccccgcccgccatgcagcgaagagaccccgggtcccggcaatggcaatggaggacccaccgctcgtacccgtggatcatctgggagctgaacaagtctatgttggcacagcacaggcatatgctcatgcatctcttcagcactctcaactcctcgggggtcaaaaccatatcccagggcacggggaactcttgcaggacagcgaaccccgcagaacagggcaatcctcgcacagaacttacattgtgcatggacagggtatcgcaatcaggcagcaccgggtgatcctccaccagagaagcgcgggtctcggtctcctcacagcgtggtaagggggccggccgatacgggtgatggcgggacgcggctgatcgtgttcgcgaccgtgtcatgatgcagttgctttcggacattttcgtacttgctgtagcagaacctggtccgggcgctgcacaccgatcgccggcggcggtctcggcgcttggaacgctcggtgttgaaattgtaaaacagccactctctcagaccgtgcagcagatctagggcctcaggagtgatgaagatcccatcatgcctgatggctctgatcacatcgaccaccgtggaatgggccagacccagccagatgatgcaattttgttgggtttcggtgacggcgggggagggaagaacaggaagaaccatgattaacttttaatccaaacggtctcggagtacttcaaaatgaagatcgcggagatggcacctctcgcccccgctgtgttggtggaaaataacagccaggtcaaaggtgatacggttctcgagatgttccacggtggcttccagcaaagcctccacgcgcacatccagaaacaagacaatagcgaaagcgggagggttctctaattcctcaatcatcatgttacactcctgcaccatccccagataattttcatttttccagccttgaatgattcgaactagttcgtgaggtaaatccaagccagccatgataaagagctcgcgcagagcgccctccaccggcattcttaagcacaccctcataattccaagatattctgctcctggttcacctgcagcagattgacaagcggaatatcaaaatctctgccgcgatccctgagctcctccctcagcaataactgtaagtactctttcatatcctctccgaaatttttagccataggaccaccaggaataagattagggcaagccacagtacagataaaccgaagtcctccccagtgagcattgccaaatgcaagactgctataagcatgctggctagacccggtgatatcttccagataactggacagaaaatcgcccaggcaatttttaagaaaatcaacaaaagaaaaatcctccaggtggacgtttagagcctcgggaacaacgatgaagtaaatgcaagcggtgcgttccagcatggttagttagctgatctgtagaaaaaacaaaaatgaacattaaaccatgctagcctggcgaacaggtgggtaaatcgttctctccagcaccaggcaggccacggggtctccggcgcgaccctcgtaaaaattgtcgctatgattgaaaaccatcacagagagacgttcccggtggccggcgtgaatgattcgacaagatgaatacacccccggaacattggcgtccgcgagtgaaaaaaagcgcccgaggaagcaataaggcactacaatgctcagtctcaagtccagcaaagcgatgccatgcggatgaagcacaaaattctcaggtgcgtacaaaatgtaattactcccctcctgcacaggcagcaaagcccccgatccctccaggtacacatacaaagcctcagcgtccatagcttaccgagcagcagcacacaacaggcgcaagagtcagagaaaggctgagctctaacctgtccacccgctctctgctcaatatatagcccagatctacactgacgtaaaggccaaagtctaaaaatacccgccaaataatcacacacgcccagcacacgcccagaaaccggtgacacactcaaaaaaatacgcgcacttcctcaaacgcccaaaactgccgtcatttccgggttcccacgctacgtcatcaaaacacgactttcaaattccgtcgaccgttaaaaacgtcacccgccccgcccctaacggtcgcccgtctctcagccaatcagcgccccgcatccccaaattcaaacacctcatttgcatattaacgcgcacaaaaagtttgaggtatattattgatgatgg

SEQ ID NO: 13 - DNA, 30684 bp, Artificial Sequence
  Description of Artificial Sequence: Synthetic polynucleotide
ccatcttcaataatatacctcaaactttttgtgcgcgttaatatgcaaatgaggcgtttgaatttggggaggaagggcggtgattggtcgagggatgagcgaccgttaggggcggggcgagtgacgttttgatgacgtggttgcgaggaggagccagtttgcaagttctcgtgggaaaagtgacgtcaaacgaggtgtggtttgaacacggaaatactcaattttcccgcgctctctgacaggaaatgaggtgtttctgggcggatgcaagtgaaaacgggccattttcgcgcgaaaactgaatgaggaagtgaaaatctgagtaatttcgcgtttatggcagggaggagtatttgccgagggccgagtagactttgaccgattacgtgggggtttcgattaccgtgtttttcacctaaatttccgcgtacggtgtcaaagtccggtgtttttacgtaggtgtcagctgatcgccagggtatttaaacctgcgctctccagtcaagaggccactcttgagtgccagcgagaagagttttctcctccgcgccgcgagtcagatctacactttgaaagtagggataacagggtaatgacattgattattgactagttgttaatagtaatcaattacggggtcattagttcatagcccatatatggagttccgcgttacataacttacggtaaatggcccgcctggctgaccgcccaacgacccccgcccattgacgtcaataatgacgtatgttcccatagtaacgccaatagggactttccattgacgtcaatgggtggagtatttacggtaaactgcccacttggcagtacatcaagtgtatcatatgccaagtccgccccctattgacgtcaatgacggtaaatggcccgcctggcattatgcccagtacatgaccttacgggactttcctacttggcagtacatctacgtattagtcatcgctattaccatggtgatgcggttttggcagtacaccaatgggcgtggatagcggtttgactcacggggatttccaagtctccaccccattgacgtcaatgggagtttgttttggcaccaaaatcaacgggactttccaaaatgtcgtaataaccccgccccgttgacgcaaatgggcggtaggcgtgtacggtgggaggtctatataagcagagctcgtttagtgaaccgtcagatcgcctggaacgccatccacgctgttttgacctccatagaagacagcgatcgcgccaccatggtgagcaagggcgaggagctgttcaccggggtggtgcccatcctggtcgagctggacggcgacgtaaacggccacaagttcagcgtgtccggcgagggcgagggcgatgccacctacggcaagctgaccctgaagttcatctgcaccaccggcaagctgcccgtgccctggcccaccctcgtgaccaccctgacctacggcgtgcagtgcttcagccgctaccccgaccacatgaagcagcacgacttcttcaagtccgccatgcccgaaggctacgtccaggagcgcaccatcttcttcaaggacgacggcaactacaagacccgcgccgaggtgaagttcgagggcgacaccctggtgaaccgcatcgagctgaagggcatcgacttcaaggaggacggcaacatcctggggcacaagctggagtacaactacaacagccacaacgtctatatcatggccgacaagcagaagaacggcatcaaggtgaacttcaagatccgccacaacatcgaggacggcagcgtgcagctcgccgaccactaccagcagaacacccccatcggcgacggccccgtgctgctgcccgacaaccactacctgagcacccagtccgccctgagcaaagaccccaacgagaagcgcgatcacatggtcctgctggagttcgtgaccgccgccgggatcactctcggcatggacgagctttacaagtagtgagtttaaactcccatttaaatgtgagggttaatgcttcgagcagacatgataagatacattgatgagtttggacaaaccacaactagaatgcagtgaaaaaaatgctttatttgtgaaatttgtgatgctattgctttatttgtaaccattataagctgcaataaacaagttaacaacaacaattgcattcattttatgtttcaggttcagggggagatgtgggaggttttttaaagcaagtaaaacctctacaaatgtggtaaaataactataacggtcctaaggtagcgagtgagtagtgttctggggcgggggaggacctgcatgagggccagaataactgaaatctgtgcttttctgtgtgttgcagcagcatgagcggaagcggctcctttgagggaggggtattcagcccttatctgacggggcgtctcccctcctgggcgggagtgcgtcagaatgtgatgggatccacggtggacggccggcccgtgcagcccgcgaactcttcaaccctgacctatgcaaccctgagctcttcgtcgttggacgcagctgccgccgcagctgctgcatctgccgccagcgccgtgcgcggaatggccatgggcgccggctactacggcactctggtggccaactcgagttccaccaataatcccgccagcctgaacgaggagaagctgttgctgctgatggcccagctcgaggccttgacccagcgcctgggcgagctgacccagcaggtggctcagctgcaggagcagacgcgggccgcggttgccacggtgaaatccaaataaaaaatgaatcaataaataaacggagacggttgttgattttaacacagagtctgaatctttatttgatttttcgcgcgcggtaggccctggaccaccggtctcgatcattgagcacccggtggatcttttccaggacccggtagaggtgggcttggatgttgaggtacatgggcatgagcccgtcccgggggtggaggtagctccattgcagggcctcgtgctcgggggtggtgttgtaaatcacccagtcatagcaggggcgcagggcatggtgttgcacaatatctttgaggaggagactgatggccacgggcagccctttggtgtaggtgtttacaaatctgttgagctgggagggatgcatgcggggggagatgaggtgcatcttggcctggatcttgagattggcgatgttaccgcccagatcccgcctggggttcatgttgtgcaggaccaccagcacggtgtatccggtgcacttggggaatttatcatgcaacttggaagggaaggcgtgaaagaatttggcgacgcctttgtgcccgcccaggttttccatgcactcatccatgatgatggcgatgggcccgtgggcggcggcctgggcaaagacgtttcgggggtcggacacatcatagttgtggtcctgggtgaggtcatcataggccattttaatgaatttggggcggagggtgccggactgggggacaaaggtaccctcgatcccgggggcgtagttcccctcacagatctgcatctcccaggctttgagctcggagggggggatcatgtccacctgcggggcgataaagaacacggtttccggggcgggggagatgagctgggccgaaagcaagttccggagcagctgggacttgccgcagccggtggggccgtagatgaccccgatgaccggctgcaggtggtagttgagggagagacagctgccgtcctcccggaggaggggggccacctcgttcatcatctcgcgcacgtgcatgttctcgcgcaccagttccgccaggaggcgctctccccccagggataggagctcctggagcgaggcgaagtttttcagcggcttgagtccgtcggccatgggcattttggagagggtttgttgcaagagttccaggcggtcccagagctcggtgatgtgctctacggcatctcgatccagcagacctcctcgtttcgcgggttgggacggctgcgggagtagggcaccagacgatgggcgtccagcgcagccagggtccggtccttccagggtcgcagcgtccgcgtcagggtggtctccgtcacggtgaaggggtgcgcgccgggctgggcgcttgcgagggtgcgcttcaggctcatccggctggtcgaaaaccgctcccgatcggcgccctgcgcgtcggccaggtagcaattgaccatgagttcgtagttgagcgcctcggccgcgtggcctttggcgcggagcttacctttggaagtctgcccgcaggcgggacagaggagggacttgagggcgtagagcttgggggcgaggaagacggactcgggggcgtaggcgtccgcgccgcagtgggcgcagacggtctcgcactccacgagccaggtgaggtcgggctggtcggggtcaaaaaccagtttcccgccgttctttttgatgcgtttcttacctttggtctccatgagctcgtgtccccgctgggtgacaaagaggctgtccgtgtccccgtagaccgactttatgggccggtcctcgagcggtgtgccgcggtcctcctcgtagaggaaccccgcccactccgagacgaaagcccgggtccaggccagcacgaaggaggccacgtgggacgggtagcggtcgttgtccaccagcgggtccaccttttccagggtatgcaaacacatgtccccctcgtccacatccaggaaggtgattggcttgtaagtgtaggccacgtgaccgggggtcccggccgggggggtataaaagggtgcgggtccctgctcgtcctcactgtcttccggatcgctgtccaggagcgccagctgttggggtaggtattccctctcgaaggcgggcatgacctcggcactcaggttgtcagtttctagaaacgaggaggatttgatattgacggtgccggcggagatgcctttcaagagcccctcgtccatctggtcagaaaagacgatctttttgttgtcgagcttggtggcgaaggagccgtagagggcgttggagaggagcttggcgatggagcgcatggtctggtttttttccttgtcggcgcgctccttggcggcgatgttgagctgcacgtactcgcgcgccacgcacttccattcggggaagacggtggtcagctcgtcgggcacgattctgacctgccagccccgattatgcagggtgatgaggtccacactggtggccacctcgccgcgcaggggctcattagtccagcagaggcgtccgcccttgcgcgagcagaaggggggcagggggtccagcatgacctcgtcgggggggtcggcatcgatggtgaagatgccgggcaggaggtcggggtcaaagtagctgatggaagtggccagatcgtccagggcagcttgccattcgcgcacggccagcgcgcgctcgtagggactgaggggcgtgccccagggcatgggatgggtaagcgcggaggcgtacatgccgcagatgtcgtagacgtagaggggctcctcgaggatgccgatgtaggtggggtagcagcgccccccgcggatgctggcgcgcacgtagtcatacagctcgtgcgagggggcgaggagccccgggcccaggttggtgcgactgggcttttcggcgcggtagacgatctggcggaaaatggcatgcgagttggaggagatggtgggcctttggaagatgttgaagtgggcgtggggcagtccgaccgagtcgcggatgaagtgggcgtaggagtcttgcagcttggcgacgagctcggcggtgactaggacgtccagagcgcagtagtcgagggtctcctggatgatgtcatacttgagctgtcccttttgtttccacagctcgcggttgagaaggaactcttcgcggtccttccagtactcttcgagggggaacccgtcctgatctgcacggtaagagcctagcatgtagaactggttgacggccttgtaggcgcagcagcccttctccacggggagggcgtaggcctgggcggccttgcgcagggaggtgtgcgtgagggcgaaagtgtccctgaccatgaccttgaggaactggtgcttgaagtcgatatcgtcgcagcccccctgctcccagagctggaagtccgtgcgcttcttgtaggcggggttgggcaaagcgaaagtaacatcgttgaagaggatcttgcccgcgcggggcataaagttgcgagtgatgcggaaaggttggggcacctcggcccggttgttgatgacctgggcggcgagcacgatctcgtcgaagccgttgatgttgtggcccacgatgtagagttccacgaatcgcggacggcccttgacgtggggcagtttcttgagctcctcgtaggtgagctcgtcggggtcgctgagcccgtgctgctcgagcgcccagtcggcgagatgggggttggcgcggaggaaggaagtccagagatccacggccagggcggtttgcagacggtcccggtactgacggaactgctgcccgacggccattttttcgggggtgacgcagtagaaggtgcgggggtccccgtgccagcgatcccatttgagctggagggcgagatcgagggcgagctcgacgagccggtcgtccccggagagtttcatgaccagcatgaaggggacgagctgcttgccgaaggaccccatccaggtgtaggtttccacatcgtaggtgaggaagagcctttcggtgcgaggatgcgagccgatggggaagaactggatctcctgccaccaattggaggaatggctgttgatgtgatggaagtagaaatgccgacggcgcgccgaacactcgtgcttgtgtttatacaagcggccacagtgctcgcaacgctgcacgggatgcacgtgctgcacgagctgtacctgagttcctttgacgaggaatttcagtgggaagtggagtcgtggcgcctgcatctcgtgctgtactacgtcgtggtggtcggcctggccctcttctgcctcgatggtggtcatgctgacgagcccgcgcgggaggcaggtccagacctcggcgcgagcgggtcggagagcgaggacgagggcgcgcaggccggagctgtccagggtcctgagacgctgcggagtcaggtcagtgggcagcggcggcgcgcggttgacttgcaggagtttttccagggcgcgcgggaggtccagatggtacttgatctccaccgcgccattggtggcgacgtcgatggcttgcagggtcccgtgcccctggggtgtgaccaccgtcccccgtttcttcttgggcggctggggcgacgggggcggtgcctcttccatggttagaagcggcggcgaggacgcgcgccgggcggcaggggcggctcggggcccggaggcaggggcggcaggggcacgtcggcgccgcgcgcgggtaggttctggtactgcgcccggagaagactggcgtgagcgacgacgcgacggttgacgtcctggatctgacgcctctgggtgaaggccacgggacccgtgagtttgaacctgaaagagagttcgacagaatcaatctcggtatcgttgacggcggcctgccgcaggatctcttgcacgtcgcccgagttgtcctggtaggcgatctcggtcatgaactgctcgatctcctcctcttgaaggtctccgcggccggcgcgctccacggtggccgcgaggtcgttggagatgcggcccatgagctgcgagaaggcgttcatgcccgcctcgttccagacgcggctgtagaccacgacgccctcgggatcgcgggcgcgcatgaccacctgggcgaggttgagctccacgtggcgcgtgaagaccgcgtagttgcagaggcgctggtagaggtagttgagcgtggtggcgatgtgctcggtgacgaagaaatacatgatccagcggcggagcggcatctcgctgacgtcgcccagcgcctccaaacgttccatggcctcgtaaaagtccacggcgaagttgaaaaactgggagttgcgcgccgagacggtcaactcctcctccagaagacggatgagctcggcgatggtggcgcgcacctcgcgctcgaaggcccccgggagttcctccacttcctcttcttcctcctccactaacatctcttctacttcctcctcaggcggcagtggtggcgggggagggggcctgcgtcgccggcggcgcacgggcagacggtcgatgaagcgctcgatggtctcgccgcgccggcgtcgcatggtctcggtgacggcgcgcccgtcctcgcggggccgcagcgtgaagacgccgccgcgcatctccaggtggccgggggggtccccgttgggcagggagagggcgctgacgatgcatcttatcaattgccccgtagggactccgcgcaaggacctgagcgtctcgagatccacgggatctgaaaaccgctgaacgaaggcttcgagccagtcgcagtcgcaaggtaggctgagcacggtttcttctggcgggtcatgttggttgggagcggggcgggcgatgctgctggtgatgaagttgaaataggcggttctgagacggcggatggtggcgaggagcaccaggtctttgggcccggcttgctggatgcgcagacggtcggccatgccccaggcgtggtcctgacacctggccaggtccttgtagtagtcctgcatgagccgctccacgggcacctcctcctcgcccgcgcggccgtgcatgcgcgtgagcccgaagccgcgctggggctggacgagcgccaggtcggcgacgacgcgctcggcgaggatggcttgctggatctgggtgagggtggtctggaagtcatcaaagtcgacgaagcggtggtaggctccggtgttgatggtgtaggagcagttggccatgacggaccagttgacggtctggtggcccggacgcacgagctcgtggtacttgaggcgcgagtaggcgcgcgtgtcgaagatgtagtcgttgcaggtgcgcaccaggtactggtagccgatgaggaagtgcggcggcggctggcggtagagcggccatcgctcggtggcgggggcgccgggcgcgaggtcctcgagcatggtgcggtggtagccgtagatgtacctggacatccaggtgatgccggcggcggtggtggaggcgcgcgggaactcgcggacgcggttccagatgttgcgcagcggcaggaagtagttcatggtgggcacggtctggcccgtgaggcgcgcgcagtcgtggatgctctatacgggcaaaaacgaaagcggtcagcggctcgactccgtggcctggaggctaagcgaacgggttgggctgcgcgtgtaccccggttcgaatctcgaatcaggctggagccgcagctaacgtggtattggcactcccgtctcgacccaagcctgcaccaaccctccaggatacggaggcgggtcgttttgcaacttttttttggaggccggatgagactagtaagcgcggaaagcggccgaccgcgatggctcgctgccgtagtctggagaagaatcgccagggttgcgttgcggtgtgccccggttcgaggccggccggattccgcggctaacgagggcgtggctgccccgtcgtttccaagaccccatagccagccgacttctccagttacggagcgagcccctcttttgttttgtttgtttttgccagatgcatcccgtactgcggcagatgcgcccccaccaccctccaccgcaacaacagccccctccacagccggcgcttctgcccccgccccagcagcaacttccagccacgaccgccgcggccgccgtgagcggggctggacagagttatgatcaccagctggccttggaagagggcgaggggctggcgcgcctgggggcgtcgtcgccggagcggcacccgcgcgtgcagatgaaaagggacgctcgcgaggcctacgtgcccaagcagaacctgttcagagacaggagcggcgaggagcccgaggagatgcgcgcggcccggttccacgcggggcgggagctgcggcgcggcctggaccgaaagagggtgctgagggacgaggatttcgaggcggacgagctgacggggatcagccccgcgcgcgcgcacgtggccgcggccaacctggtcacggcgtacgagcagaccgtgaaggaggagagcaacttccaaaaatccttcaacaaccacgtgcgcaccctgatcgcgcgcgaggaggtgaccctgggcctgatgcacctgtgggacctgctggaggccatcgtgcagaaccccaccagcaagccgctgacggcgcagctgttcctggtggtgcagcatagtcgggacaacgaagcgttcagggaggcgctgctgaatatcaccgagcccgagggccgctggctcctggacctggtgaacattctgcagagcatcgtggtgcaggagcgcgggctgccgctgtccgagaagctggcggccatcaacttctcggtgctgagtttgggcaagtactacgctaggaagatctacaagaccccgtacgtgcccatagacaaggaggtgaagatcgacgggttttacatgcgcatgaccctgaaagtgctgaccctgagcgacgatctgggggtgtaccgcaacgacaggatgcaccgtgcggtgagcgccagcaggcggcgcgagctgagcgaccaggagctgatgcatagtctgcagcgggccctgaccggggccgggaccgagggggagagctactttgacatgggcgcggacctgcactggcagcccagccgccgggccttggaggcggcggcaggaccctacgtagaagaggtggacgatgaggtggacgaggagggcgagtacctggaagactgatggcgcgaccgtatttttgctagatgcaacaacaacagccacctcctgatcccgcgatgcgggcggcgctgcagagccagccgtccggcattaactcctcggacgattggacccaggccatgcaacgcatcatggcgctgacgacccgcaaccccgaagcctttagacagcagccccaggccaaccggctctcggccatcctggaggccgtggtgccctcgcgctccaaccccacgcacgagaaggtcctggccatcgtgaacgcgctggtggagaacaaggccatccgcggcgacgaggccggcctggtgtacaacgcgctgctggagcgcgtggcccgctacaacagcaccaacgtgcagaccaacctggaccgcatggtgaccgacgtgcgcgaggccgtggcccagcgcgagcggttccaccgcgagtccaacctgggatccatggtggcgctgaacgccttcctcagcacccagcccgccaacgtgccccggggccaggaggactacaccaacttcatcagcgccctgcgcctgatggtgaccgaggtgccccagagcgaggtgtaccagtccgggccggactacttcttccagaccagtcgccagggcttgcagaccgtgaacctgagccaggctttcaagaacttgcagggcctgtggggcgtgcaggccccggtcggggaccgcgcgacggtgtcgagcctgctgacgccgaactcgcgcctgctgctgctgctggtggcccccttcacggacagcggcagcatcaaccgcaactcgtacctgggctacctgattaacctgtaccgcgaggccatcggccaggcgcacgtggacgagcagacctaccaggagatcacccacgtgagccgcgccctgggccaggacgacccgggcaacctggaagccaccctgaactttttgctgaccaaccggtcgcagaagatcccgccccagtacgcgctcagcaccgaggaggagcgcatcctgcgttacgtgcagcagagcgtgggcctgttcctgatgcaggagggggccacccccagcgccgcgctcgacatgaccgcgcgcaacatggagcccagcatgtacgccagcaaccgcccgttcatcaataaactgatggactacttgcatcgggcggccgccatgaactctgactatttcaccaacgccatcctgaatccccactggctcccgccgccggggttctacacgggcgagtacgacatgcccgaccccaatgacgggttcctgtgggacgatgtggacagcagcgtgttctccccccgaccgggtgctaacgagcgccccttgtggaagaaggaaggcagcgaccgacgcccgtcctcggcgctgtccggccgcgagggtgctgccgcggcggtgcccgaggccgccagtcctttcccgagcttgcccttctcgctgaacagtatccgcagcagcgagctgggcaggatcacgcgcccgcgcttgctgggcgaagaggagtacttgaatgactcgctgttgagacccgagcgggagaagaacttccccaataacgggatagaaagcctggtggacaagatgagccgctggaagacgtatgcgcaggagcacagggacgatccccgggcgtcgcagggggccacgagccggggcagcgccgcccgtaaacgccggtggcacgacaggcagcggggacagatgtgggacgatgaggactccgccgacgacagcagcgtgttggacttgggtgggagtggtaacccgttcgctcacctgcgcccccgtatcgggcgcatgatgtaagagaaaccgaaaataaatgatactcaccaaggccatggcgaccagcgtgcgttcgtttcttctctgttgttgttgtatctagtatgatgaggcgtgcgtacccggagggtcctcctccctcgtacgagagcgtgatgcagcaggcgatggcggcggcggcgatgcagcccccgctggaggctccttacgtgcccccgcggtacctggcgcctacggaggggcggaacagcattcgttactcggagctggcacccttgtacgataccacccggttgtacctggtggacaacaagtcggcggacatcgcctcgctgaactaccagaacgaccacagcaacttcctgaccaccgtggtgcagaacaatgacttcacccccacggaggccagcacccagaccatcaactttgacgagcgctcgcggtggggcggccagctgaaaaccatcatgcacaccaacatgcccaacgtgaacgagttcatgtacagcaacaagttcaaggcgcgggtgatggtctcccgcaagacccccaatggggtgacagtgacagaggattatgatggtagtcaggatgagctgaagtatgaatgggtggaatttgagctgcccgaaggcaacttctcggtgaccatgaccatcgacctgatgaacaacgccatcatcgacaattacttggcggtggggcggcagaacggggtgctggagagcgacatcggcgtgaagttcgacactaggaacttcaggctgggctgggaccccgtgaccgagctggtcatgcccggggtgtacaccaacgaggctttccatcccgatattgtcttgctgcccggctgcggggtggacttcaccgagagccgcctcagcaacctgctgggcattcgcaagaggcagcccttccaggaaggcttccagatcatgtacgaggatctggaggggggcaacatccccgcgctcctggatgtcgacgcctatgagaaaagcaaggaggatgcagcagctgaagcaactgcagccgtagctaccgcctctaccgaggtcaggggcgataattttgcaagcgccgcagcagtggcagcggccgaggcggctgaaaccgaaagtaagatagtcattcagccggtggagaaggatagcaagaacaggagctacaacgtactaccggacaagataaacaccgcctaccgcagctggtacctagcctacaactatggcgaccccgagaagggcgtgcgctcctggacgctgctcaccacctcggacgtcacctgcggcgtggagcaagtctactggtcgctgcccgacatgatgcaagacccggtcaccttccgctccacgcgtcaagttagcaactacccggtggtgggcgccgagctcctgcccgtctactccaagagcttcttcaacgagcaggccgtctactcgcagcagctgcgcgccttcacctcgcttacgcacgtcttcaaccgcttccccgagaaccagatcctcgtccgcccgcccgcgcccaccattaccaccgtcagtgaaaacgttcctgctctcacagatcacgggaccctgccgctgcgcagcagtatccggggagtccagcgcgtgaccgttactgacgccagacgccgcacctgcccctacgtctacaaggccctgggcatagtcgcgccgcgcgtcctctcgagccgcaccttctaaatgtccattctcatctcgcccagtaataacaccggttggggcctgcgcgcgcccagcaagatgtacggaggcgctcgccaacgctccacgcaacaccccgtgcgcgtgcgcgggcacttccgcgctccctggggcgccctcaagggccgcgtgcggtcgcgcaccaccgtcgacgacgtgatcgaccaggtggtggccgacgcgcgcaactacacccccgccgccgcgcccgtctccaccgtggacgccgtcatcgacagcgtggtggccgacgcgcgccggtacgcccgcgccaagagccggcggcggcgcatcgcccggcggcaccggagcacccccgccatgcgcgcggcgcgagccttgctgcgcagggccaggcgcacgggacgcagggccatgctcagggcggccagacgcgcggcttcaggcgccagcgccggcaggacccggagacgcgcggccacggcggcggcagcggccatcgccagcatgtcccgcccgcggcgagggaacgtgtactgggtgcgcgacgccgccaccggtgtgcgcgtgcccgtgcgcacccgcccccctcgcacttgaagatgttcacttcgcgatgttgatgtgtcccagcggcgaggaggatgtccaagcgcaaattcaaggaagagatgctccaggtcatcgcgcctgagatctacggccctgcggtggtgaaggaggaaagaaagccccgcaaaatcaagcgggtcaaaaaggacaaaaaggaagaagaaagtgatgtggacggattggtggagtttgtgcgcgagttcgccccccggcggcgcgtgcagtggcgcgggcggaaggtgcaaccggtgctgagacccggcaccaccgtggtcttcacgcccggcgagcgctccggcaccgcttccaagcgctcctacgacgaggtgtacggggatgatgatattctggagcaggcggccgagcgcctgggcgagtttgcttacggcaagcgcagccgttccgcaccgaaggaagaggcggtgtccatcccgctggaccacggcaaccccacgccgagcctcaagcccgtgaccttgcagcaggtgctgccgaccgcggcgccgcgccgggggttcaagcgcgagggcgaggatctgtaccccaccatgcagctgatggtgcccaagcgccagaagctggaagacgtgctggagaccatgaaggtggacccggacgtgcagcccgaggtcaaggtgcggcccatcaagcaggtggccccgggcctgggcgtgcagaccgtggacatcaagattcccacggagcccatggaaacgcagaccgagcccatgatcaagcccagcaccagcaccatggaggtgcagacggatccctggatgccatcggctcctagtcgaagaccccggcgcaagtacggcgcggccagcctgctgatgcccaactacgcgctgcatccttccatcatccccacgccgggctaccgcggcacgcgcttctaccgcggtcataccagcagccgccgccgcaagaccaccactcgccgccgccgtcgccgcaccgccgctgcaaccacccctgccgccctggtgcggagagtgtaccgccgcggccgcgcacctctgaccctgccgcgcgcgcgctaccacccgagcatcgccatttaaactttcgcctgctttgcagatcaatggccctcacatgccgccttcgcgttcccattacgggctaccgaggaagaaaaccgcgccgtagaaggctggcggggaacgggatgcgtcgccaccaccaccggcggcggcgcgccatcagcaagcggttggggggaggcttcctgcccgcgctgatccccatcatcgccgcggcgatcggggcgatccccggcattgcttccgtggcggtgcaggcctctcagcgccactgagacacacttggaaacatcttgtaataaaccaatggactctgacgctcctggtcctgtgatgtgttttcgtagacagatggaagacatcaatttttcgtccctggctccgcgacacggcacgcggccgttcatgggcacctggagcgacatcggcaccagccaactgaacgggggcgccttcaattggagcagtctctggagcgggcttaagaatttcgggtccacgcttaaaacctatggcagcaaggcgtggaacagcaccacagggcaggcgctgagggataagctgaaagagcagaacttccagcagaaggtggtcgatgggctcgcctcgggcatcaacggggtggtggacctggccaaccaggccgtgcagcggcagatcaacagccgcctggacccggtgccgcccgccggctccgtggagatgccgcaggtggaggaggagctgcctcccctggacaagcggggcgagaagcgaccccgccccgatgcggaggagacgctgctgacgcacacggacgagccgcccccgtacgaggaggcggtgaaactgggtctgcccaccacgcggcccatcgcgcccctggccaccggggtgctgaaacccgaaaagcccgcgaccctggacttgcctcctccccagccttcccgcccctctacagtggctaagcccctgccgccggtggccgtggcccgcgcgcgacccgggggcaccgcccgccctcatgcgaactggcagagcactctgaacagcatcgtgggtctgggagtgcagagtgtgaagcgccgccgctgctattaaacctaccgtagcgcttaacttgcttgtctgtgtgtgtatgtattatgtcgccgccgccgctgtccaccagaaggaggagtgaagaggcgcgtcgccgagttgcaagatggccaccccatcgatgctgccccagtgggcgtacatgcacatcgccggacaggacgcttcggagtacctgagtccgggtctggtgcagtttgcccgcgccacagacacctacttcagtctggggaacaagtttaggaaccccacggtggcgcccacgcacgatgtgaccaccgaccgcagccagcggctgacgctgcgcttcgtgcccgtggaccgcgaggacaacacctactcgtacaaagtgcgctacacgctggccgtgggcgacaaccgcgtgctggacatggccagcacctactttgacatccgcggcgtgctggatcggggccctagcttcaaaccctactccggcaccgcctacaacagtctggcccccaagggagcacccaacacttgtcagtggacatataaagccgatggtgaaactgccacagaaaaaacctatacatatggaaatgcacccgtgcagggcattaacatcacaaaagatggtattcaacttggaactgacaccgatgatcagccaatctacgcagataaaacctatcagcctgaacctcaagtgggtgatgctgaatggcatgacatcactggtactgatgaaaagtatggaggcagagctcttaagcctgataccaaaatgaagccttgttatggttcttttgccaagcctactaataaagaaggaggtcaggcaaatgtgaaaacaggaacaggcactactaaagaatatgacatagacatggctttctttgacaacagaagtgcggctgctgctggcctagctccagaaattgttttgtatactgaaaatgtggatttggaaactccagatacccatattgtatacaaagcaggcacagatgacagcagctcttctattaatttgggtcagcaagccatgcccaacagacctaactacattggtttcagagacaactttatcgggctcatgtactacaacagcactggcaatatgggggtgctggccggtcaggcttctcagctgaatgctgtggttgacttgcaagacagaaacaccgagctgtcctaccagctcttgcttgactctctgggtgacagaacccggtatttcagtatgtggaatcaggcggtggacagctatgatcctgatgtgcgcattattgaaaatcatggtgtggaggatgaacttcccaactattgtttccctctggatgctgttggcagaacagatacttatcagggaattaaggctaatggaactgatcaaaccacatggaccaaagatgacagtgtcaatgatgctaatgagataggcaagggtaatccattcgccatggaaatcaacatccaagccaacctgtggaggaacttcctctacgccaacgtggccctgtacctgcccgactcttacaagtacacgccggccaatgttaccctgcccaccaacaccaacacctacgattacatgaacggccgggtggtggcgccctcgctggtggactcctacatcaacatcggggcgcgctggtcgctggatcccatggacaacgtgaaccccttcaaccaccaccgcaatgcggggctgcgctaccgctccatgctcctgggcaacgggcgctacgtgcccttccacatccaggtgccccagaaatttttcgccatcaagagcctcctgctcctgcccgggtcctacacctacgagtggaacttccgcaaggacgtcaacatgatcctgcagagctccctcggcaacgacctgcgcacggacggggcctccatctccttcaccagcatcaacctctacgccaccttcttccccatggcgcacaacacggcctccacgctcgaggccatgctgcgcaacgacaccaacgaccagtccttcaacgactacctctcggcggccaacatgctctaccccatcccggccaacgccaccaacgtgcccatctccatcccctcgcgcaactgggccgccttccgcggctggtccttcacgcgtctcaagaccaaggagacgccctcgctgggctccgggttcgacccctacttcgtctactcgggctccatcccctacctcgacggcaccttctacctcaaccacaccttcaagaaggtctccatcaccttcgactcctccgtcagctggcccggcaacgaccggctcctgacgcccaacgagttcgaaatcaagcgcaccgtcgacggcgagggctacaacgtggcccagtgcaacatgaccaaggactggttcctggtccagatgctggcccactacaacatcggctaccagggcttctacgtgcccgagggctacaaggaccgcatgtactccttcttccgcaacttccagcccatgagccgccaggtggtggacgaggtcaactacaaggactaccaggccgtcaccctggcctaccagcacaacaactcgggcttcgtcggctacctcgcgcccaccatgcgccagggccagccctaccccgccaactacccctacccgctcatcggcaagagcgccgtcaccagcgtcacccagaaaaagttcctctgcgacagggtcatgtggcgcatccccttctccagcaacttcatgtccatgggcgcgctcaccgacctcggccagaacatgctctatgccaactccgcccacgcgctagacatgaatttcgaagtcgaccccatggatgagtccacccttctctatgttgtcttcgaagtcttcgacgtcgtccgagtgcaccagccccaccgcggcgtcatcgaggccgtctacctgcgcacccccttctcggccggtaacgccaccacctaagctcttgcttcttgcaagccatggccgcgggctccggcgagcaggagctcagggccatcatccgcgacctgggctgcgggccctacttcctgggcaccttcgataagcgcttcccgggattcatggccccgcacaagctggcctgcgccatcgtcaacacggccggccgcgagaccgggggcgagcactggctggccttcgcctggaacccgcgctcgaacacctgctacctcttcgaccccttcgggttctcggacgagcgcctcaagcagatctaccagttcgagtacgagggcctgctgcgccgcagcgccctggccaccgaggaccgctgcgtcaccctggaaaagtccacccagaccgtgcagggtccgcgctcggccgcctgcgggctcttctgctgcatgttcctgcacgccttcgtgcactggcccgaccgccccatggacaagaaccccaccatgaacttgctgacgggggtgcccaacggcatgctccagtcgccccaggtggaacccaccctgcgccgcaaccaggaggcgctctaccgcttcctcaactcccactccgcctactttcgctcccaccgcgcgcgcatcgagaaggccaccgccttcgaccgcatgaatcaagacatgtaaaccgtgtgtgtatgttaaatgtctttaataaacagcactttcatgttacacatgcatctgagatgatttatttagaaatcgaaagggttctgccgggtctcggcatggcccgcgggcagggacacgttgcggaactggtacttggccagccacttgaactcggggatcagcagtttgggcagcggggtgtcggggaaggagtcggtccacagcttccgcgtcagttgcagggcgcccagcaggtcgggcgcggagatcttgaaatcgcagttgggacccgcgttctgcgcgcgggagttgcggtacacggggttgcagcactggaacaccatcagggccgggtgcttcacgctcgccagcaccgtcgcgtcggtgatgctctccacgtcgaggtcctcggcgttggccatcccgaagggggtcatcttgcaggtctgccttcccatggtgggcacgcacccgggcttgtggttgcaatcgcagtgcagggggatcagcatcatctgggcctggtcggcgttcatccccgggtacatggccttcatgaaagcctccaattgcctgaacgcctgctgggccttggctccctcggtgaagaagaccccgcaggacttgctagagaactggttggtggcgcacccggcgtcgtgcacgcagcagcgcgcgtcgttgttggccagctgcaccacgctgcgcccccagcggttctgggtgatcttggcccggtcggggttctccttcagcgcgcgctgcccgttctcgctcgccacatccatctcgatcatgtgctccttctggatcatggtggtcccgtgcaggcaccgcagcttgccctcggcctcggtgcacccgtgcagccacagcgcgcacccggtgcactcccagttcttgtgggcgatctgggaatgcgcgtgcacgaagccctgcaggaagcggcccatcatggtggtcagggtcttgttgctagtgaaggtcagcggaatgccgcggtgctcctcgttgatgtacaggtggcagatgcggcggtacacctcgccctgctcgggcatcagctggaagttggctttcaggtcggtctccacgcggtagcggtccatcagcatagtcatgatttccatacccttctcccaggccgagacgatgggcaggctcatagggttcttcaccatcatcttagcgctagcagccgcggccagggggtcgctctcgtccagggtctcaaagctccgcttgccgtccttctcggtgatccgcaccggggggtagctgaagcccacggccgccagctcctcctcggcctgtctttcgtcctcgctgtcctggctgacgtcctgcaggaccacatgcttggtcttgcggggtttcttcttgggcggcagcggcggcggagatgttggagatggcgagggggagcgcgagttctcgctcaccactactatctcttcctcttcttggtccgaggccacgcggcggtaggtatgtctcttcgggggcagaggcggaggcgacgggctctcgccgccgcgacttggcggatggctggcagagccccttccgcgttcgggggtgcgctcccggcggcgctctgactgacttcctccgcggccggccattgtgttctcctagggaggaacaacaagcatggagactcagccatcgccaacctcgccatctgcccccaccgccgacgagaagcagcagcagcagaatgaaagcttaaccgccccgccgcccagccccgccacctccgacgcggccgtcccagacatgcaagagatggaggaatccatcgagattgacctgggctatgtgacgcccgcggagcacgaggaggagctggcagtgcgcttttcacaagaagagatacaccaagaacagccagagcaggaagcagagaatgagcagagtcaggctgggctcgagcatgacggcgactacctccacctgagcgggggggaggacgcgctcatcaagcatctggcccggcaggccaccatcgtcaaggatgcgctgctcgaccgcaccgaggtgcccctcagcgtggaggagctcagccgcgcctacgagttgaacctcttctcgccgcgcgtgccccccaagcgccagcccaatggcacctgcgagcccaacccgcgcctcaacttctacccggtcttcgcggtgcccgaggccctggccacctaccacatctttttcaagaaccaaaagatccccgtctcctgccgcgccaaccgcacccgcgccgacgcccttttcaacctgggtcccggcgcccgcctacctgatatcgcctccttggaagaggttcccaagatcttcgagggtctgggcagcgacgagactcgggccgcgaacgctctgcaaggagaaggaggagagcatgagcaccacagcgccctggtcgagttggaaggcgacaacgcgcggctggcggtgctcaaacgcacggtcgagctgacccatttcgcctacccggctctgaacctgccccccaaagtcatgagcgcggtcatggaccaggtgctcatcaagcgcgcgtcgcccatctccgaggacgagggcatgcaagactccgaggagggcaagcccgtggtcagcgacgagcagctggcccggtggctgggtcctaatgctagtccccagagtttggaagagcggcgcaaactcatgatggccgtggtcctggtgaccgtggagctggagtgcctgcgccgcttcttcgccgacgcggagaccctgcgcaaggtcgaggagaacctgcactacctcttcaggcacgggttcgtgcgccaggcctgcaagatctccaacgtggagctgaccaacctggtctcctacatgggcatcttgcacgagaaccgcctggggcagaacgtgctgcacaccaccctgcgcggggaggcccggcgcgactacatccgcgactgcgtctacctctacctctgccacacctggcagacgggcatgggcgtgtggcagcagtgtctggaggagcagaacctgaaagagctctgcaagctcctgcagaagaacctcaagggtctgtggaccgggttcgacgagcgcaccaccgcctcggacctggccgacctcattttccccgagcgcctcaggctgacgctgcgcaacggcctgcccgactttatgagccaaagcatgttgcaaaactttcgctctttcatcctcgaacgctccggaatcctgcccgccacctgctccgcgctgccctcggacttcgtgccgctgaccttccgcgagtgccccccgccgctgtggagccactgctacctgctgcgcctggccaactacctggcctaccactcggacgtgatcgaggacgtcagcggcgagggcctgctcgagtgccactgccgctgcaacctctgcacgccgcaccgctccctggcctgcaacccccagctgctgagcgagacccagatcatcggcaccttcgagttgcaagggcccagcgaaggcgagggttcagccgccaaggggggtctgaaactcaccccggggctgtggacctcggcctacttgcgcaagttcgtgcccgaggactaccatcccttcgagatcaggttctacgaggaccaatcccatccgcccaaggccgagctgtcggcctgcgtcatcacccagggggcgatcctggcccaattgcaagccatccagaaatcccgccaagaattcttgctgaaaaagggccgcggggtctacctcgacccccagaccggtgaggagctcaaccccggcttcccccaggatgccccgaggaaacaagaagctgaaagtggagctgccgcccgtggaggatttggaggaagactgggagaacagcagtcaggcagaggaggaggagatggaggaagactgggacagcactcaggcagaggaggacagcctgcaagacagtctggaggaagacgaggaggaggcagaggaggaggtggaagaagcagccgccgccagaccgtcgtcctcggcgggggagaaagcaagcagcacggataccatctccgctccgggtcggggtcccgctcgaccacacagtagatgggacgagaccggacgattcccgaaccccaccacccagaccggtaagaaggagcggcagggatacaagtcctggcgggggcacaaaaacgccatcgtctcctgcttgcaggcctgcgggggcaacatctccttcacccggcgctacctgctcttccaccgcggggtgaactttccccgcaacatcttgcattactaccgtcacctccacagcccctactacttccaagaagaggcagcagcagcagaaaaagaccagcagaaaaccagcagctagaaaatccacagcggcggcagcaggtggactgaggatcgcggcgaacgagccggcgcaaacccgggagctgaggaaccggatctttcccaccctctatgccatcttccagcagagtcgggggcaggagcaggaactgaaagtcaagaaccgttctctgcgctcgctcacccgcagttgtctgtatcacaagagcgaagaccaacttcagcgcactctcgaggacgccgaggctctcttcaacaagtactgcgcgctcactcttaaagagtagcccgcgcccgcccagtcgcagaaaaaggcgggaattacgtcacctgtgcccttcgccctagccgcctccacccatcatcatgagcaaagagattcccacgccttacatgtggagctaccagccccagatgggcctggccgccggtgccgcccaggactactccacccgcatgaattggctcagcgccgggcccgcgatgatctcacgggtgaatgacatccgcgcccaccgaaaccagatactcctagaacagtcagcgctcaccgccacgccccgcaatcacctcaatccgcgtaattggcccgccgccctggtgtaccaggaaattccccagcccacgaccgtactacttccgcgagacgcccaggccgaagtccagctgactaactcaggtgtccagctggcgggcggcgccaccctgtgtcgtcaccgccccgctcagggtataaagcggctggtgatccggggcagaggcacacagctcaacgacgaggtggtgagctcttcgctgggtctgcgacctgacggagtcttccaactcgccggatcggggagatcttccttcacgcctcgtcaggccgtcctgactttggagagttcgtcctcgcagccccgctcgggtggcatcggcactctccagttcgtggaggagttcactccctcggtctacttcaaccccttctccggctcccccggccactacccggacgagttcatcccgaacttcgacgccatcagcgagtcggtggacggctacgattgaaactaatcacccccttatccagtgaaataaagatcatattgatgatgattttacagaaataaaaaataatcatttgatttgaaataaagatacaatcatattgatgatttgagtttaacaaaaaaataaagaatcacttacttgaaatctgataccaggtctctgtccatgttttctgccaacaccacttcactcccctcttcccagctctggtactgcaggccccggcgggctgcaaacttcctccacacgctgaaggggatgtcaaattcctcctgtccctcaatcttcattttatcttctatcagatgtccaaaaagcgcgtccgggtggatgatgacttcgaccccgtctacccctacgatgcagacaacgcaccgaccgtgcccttcatcaacccccccttcgtctcttcagatggattccaagagaagcccctgggggtgttgtccctgcgactggccgaccccgtcaccaccaagaacggggaaatcaccctcaagctgggagagggggtggacctcgattcctcgggaaaactcatctccaacacggccaccaaggccgccgcccctctcagtttttccaacaacaccatttcccttaacatggatcaccccttttacactaaagatggaaaattatccttacaagtttctccaccattaaatatactgagaacaagcattctaaacacactagctttaggttttggatcaggtttaggactccgtggctctgccttggcagtacagttagtctctccacttacatttgatactgatggaaacataaagcttaccttagacagaggtttgcatgttacaacaggagatgcaattgaaagcaacataagctgggctaaaggtttaaaatttgaagatggagccatagcaaccaacattggaaatgggttagagtttggaagcagtagtacagaaacaggtgttgatgatgcttacccaatccaagttaaacttggatctggccttagctttgacagtacaggagccataatggctggtaacaaagaagacgataaactcactttgtggacaacacctgatccatcaccaaactgtcaaatactcgcagaaaatgatgcaaaactaacactttgcttgactaaatgtggtagtcaaatactggccactgtgtcagtcttagttgtaggaagtggaaacctaaaccccattactggcaccgtaagcagtgctcaggtgtttctacgttttgatgcaaacggtgttcttttaacagaacattctacactaaaaaaatactgggggtataggcagggagatagcatagatggcactccatataccaatgctgtaggattcatgcccaatttaaaagcttatccaaagtcacaaagttctactactaaaaataatatagtagggcaagtatacatgaatggagatgtttcaaaacctatgcttctcactataaccctcaatggtactgatgacagcaacagtacatattcaatgtcattttcatacacctggactaatggaagctatgttggagcaacatttggggctaactcttataccttctcatacatcgcccaagaatgaacactgtatcccaccctgcatgccaacccttcccaccccactctgtggaacaaactctgaaacacaaaataaaataaagttcaagtgttttattgattcaacagttttacaggattcgagcagttatttttcctccaccctcccaggacatggaatacaccaccctctccccccgcacagccttgaacatctgaatgccattggtgatggacatgcttttggtctccacgttccacacagtttcagagcgagccagtctcgggtcggtcagggagatgaaaccctccgggcactcccgcatctgcacctcacagctcaacagctgaggattgtcctcggtggtcgggatcacggttatctggaagaagcagaagagcggcggtgggaatcatagtccgcgaacgggatcggccggtggtgtcgcatcaggccccgcagcagtcgctgccgccgccgctccgtcaagctgctgctcagggggtccgggtccagggactccctcagcatgatgcccacggccctcagcatcagtcgtctggtgcggcgggcgcagcagcgcatgcggatctcgctcaggtcgctgcagtacgtgcaacacagaaccaccaggttgttcaacagtccatagttcaacacgctccagccgaaactcatcgcgggaaggatgctacccacgtggccgtcgtaccagatcctcaggtaaatcaagtggtgccccctccagaacacgctgcccacgtacatgatctccttgggcatgtggcggttcaccacctcccggtaccacatcaccctctggttgaacatgcagccccggatgatcctgcggaaccacagggccagcaccgccccgcccgccatgcagcgaagagaccccgggtcccggcaatggcaatggaggacccaccgctcgtacccgtggatcatctgggagctgaacaagtctatgttggcacagcacaggcatatgctcatgcatctcttcagcactctcaactcctcgggggtcaaaaccatatcccagggcacggggaactcttgcaggacagcgaaccccgcagaacagggcaatcctcgcacagaacttacattgtgcatggacagggtatcgcaatcaggcagcaccgggtgatcctccaccagagaagcgcgggtctcggtctcctcacagcgtggtaagggggccggccgatacgggtgatggcgggacgcggctgatcgtgttcgcgaccgtgtcatgatgcagttgctttcggacattttcgtacttgctgtagcagaacctggtccgggcgctgcacaccgatcgccggcggcggtctcggcgcttggaacgctcggtgttgaaattgtaaaacagccactctctcagaccgtgcagcagatctagggcctcaggagtgatgaagatcccatcatgcctgatggctctgatcacatcgaccaccgtggaatgggccagacccagccagatgatgcaattttgttgggtttcggtgacggcgggggagggaagaacaggaagaaccatgattaacttttaatccaaacggtctcggagtacttcaaaatgaagatcgcggagatggcacctctcgcccccgctgtgttggtggaaaataacagccaggtcaaaggtgatacggttctcgagatgttccacggtggcttccagcaaagcctccacgcgcacatccagaaacaagacaatagcgaaagcgggagggttctctaattcctcaatcatcatgttacactcctgcaccatccccagataattttcatttttccagccttgaatgattcgaactagttcctgaggtaaatccaagccagccatgataaagagctcgcgcagagcgccctccaccggcattcttaagcacaccctcataattccaagatattctgctcctggttcacctgcagcagattgacaagcggaatatcaaaatctctgccgcgatccctgagctcctccctcagcaataactgtaagtactctttcatatcctctccgaaatttttagccataggaccaccaggaataagattagggcaagccacagtacagataaaccgaagtcctccccagtgagcattgccaaatgcaagactgctataagcatgctggctagacccggtgatatcttccagataactggacagaaaatcgcccaggcaatttttaagaaaatcaacaaaagaaaaatcctccaggtggacgtttagagcctcgggaacaacgatgaagtaaatgcaagcggtgcgttccagcatggttagttagctgatctgtagaaaaaacaaaaatgaacattaaaccatgctagcctggcgaacaggtgggtaaatcgttctctccagcaccaggcaggccacggggtctccggcgcgaccctcgtaaaaattgtcgctatgattgaaaaccatcacagagagacgttcccggtggccggcgtgaatgattcgacaagatgaatacacccccggaacattggcgtccgcgagtgaaaaaaagcgcccgaggaagcaataaggcactacaatgctcagtctcaagtccagcaaagcgatgccatgcggatgaagcacaaaattctcaggtgcgtacaaaatgtaattactcccctcctgcacaggcagcaaagcccccgatccctccaggtacacatacaaagcctcagcgtccatagcttaccgagcagcagcacacaacaggcgcaagagtcagagaaaggctgagctctaacctgtccacccgctctctgctcaatatatagcccagatctacactgacgtaaaggccaaagtctaaaaatacccgccaaataatcacacacgcccagcacacgcccagaaaccggtgacacactcaaaaaaatacgcgcacttcctcaaacgcccaaaactgccgtcatttccgggttcccacgctacgtcatcaaaacacgactttcaaattccgtcgaccgttaaaaacgtcacccgccccgcccctaacggtcgcccgtctctcagccaatcagcgccccgcatccccaaattcaaacacctcatttgcatattaacgcgcacaaaaagtttgaggtatattattgatgatgg

SEQ ID NO: 14 - DNA, 8602 bp, Artificial Sequence
  Description of Artificial Sequence: Synthetic polynucleotide
atgggcggcgcatgagagaagcccagaccaattacctacccaaaatggagaaagttcacgttgacatcgaggaagacagcccattcctcagagctttgcagcggagcttcccgcagtttgaggtagaagccaagcaggtcactgataatgaccatgctaatgccagagcgttttcgcatctggcttcaaaactgatcgaaacggaggtggacccatccgacacgatccttgacattggaagtgcgcccgcccgcagaatgtattctaagcacaagtatcattgtatctgtccgatgagatgtgcggaagatccggacagattgtataagtatgcaactaagctgaagaaaaactgtaaggaaataactgataaggaattggacaagaaaatgaaggagctcgccgccgtcatgagcgaccctgacctggaaactgagactatgtgcctccacgacgacgagtcgtgtcgctacgaagggcaagtcgctgtttaccaggatgtatacgcggttgacggaccgacaagtctctatcaccaagccaataagggagttagagtcgcctactggataggctttgacaccaccccttttatgtttaagaacttggctggagcatatccatcatactctaccaactgggccgacgaaaccgtgttaacggctcgtaacataggcctatgcagctctgacgttatggagcggtcacgtagagggatgtccattcttagaaagaagtatttgaaaccatccaacaatgttctattctctgttggctcgaccatctaccacgagaagagggacttactgaggagctggcacctgccgtctgtatttcacttacgtggcaagcaaaattacacatgtcggtgtgagactatagttagttgcgacgggtacgtcgttaaaagaatagctatcagtccaggcctgtatgggaagccttcaggctatgctgctacgatgcaccgcgagggattcttgtgctgcaaagtgacagacacattgaacggggagagggtctcttttcccgtgtgcacgtatgtgccagctacattgtgtgaccaaatgactggcatactggcaacagatgtcagtgcggacgacgcgcaaaaactgctggttgggctcaaccagcgtatagtcgtcaacggtcgcacccagagaaacaccaataccatgaaaaattaccttttgcccgtagtggcccaggcatttgctaggtgggcaaaggaatataaggaagatcaagaagatgaaaggccactaggactacgagatagacagttagtcatggggtgttgttgggcttttagaaggcacaagataacatctatttataagcgcccggatacccaaaccatcatcaaagtgaacagcgatttccactcattcgtgctgcccaggataggcagtaacacattggagatcgggctgagaacaagaatcaggaaaatgttagaggagcacaaggagccgtcacctctcattaccgccgaggacgtacaagaagctaagtgcgcagccgatgaggctaaggaggtgcgtgaagccgaggagttgcgcgcagctctaccacctttggcagctgatgttgaggagcccactctggaagccgatgtcgacttgatgttacaagaggctggggccggctcagtggagacacctcgtggcttgataaaggttaccagctacgctggcgaggacaagatcggctcttacgctgtgctttctccgcaggctgtactcaagagtgaaaaattatcttgcatccaccctctcgctgaacaagtcatagtgataacacactctggccgaaaagggcgttatgccgtggaaccataccatggtaaagtagtggtgccagagggacatgcaatacccgtccaggactttcaagctctgagtgaaagtgccaccattgtgtacaacgaacgtgagttcgtaaacaggtacctgcaccatattgccacacatggaggagcgctgaacactgatgaagaatattacaaaactgtcaagcccagcgagcacgacggcgaatacctgtacgacatcgacaggaaacagtgcgtcaagaaagaactagtcactgggctagggctcacaggcgagctggtggatcctcccttccatgaattcgcctacgagagtctgagaacacgaccagccgctccttaccaagtaccaaccataggggtgtatggcgtgccaggatcaggcaagtctggcatcattaaaagcgcagtcaccaaaaaagatctagtggtgagcgccaagaaagaaaactgtgcagaaattataagggacgtcaagaaaatgaaagggctggacgtcaatgccagaactgtggactcagtgctcttgaatggatgcaaacaccccgtagagaccctgtatattgacgaagcttttgcttgtcatgcaggtactctcagagcgctcatagccattataagacctaaaaaggcagtgctctgcggggatcccaaacagtgcggtttttttaacatgatgtgcctgaaagtgcattttaaccacgagatttgcacacaagtcttccacaaaagcatctctcgccgttgcactaaatctgtgacttcggtcgtctcaaccttgttttacgacaaaaaaatgagaacgacgaatccgaaagagactaagattgtgattgacactaccggcagtaccaaacctaagcaggacgatctcattctcacttgtttcagagggtgggtgaagcagttgcaaatagattacaaaggcaacgaaataatgacggcagctgcctctcaagggctgacccgtaaaggtgtgtatgccgttcggtacaaggtgaatgaaaatcctctgtacgcacccacctcagaacatgtgaacgtcctactgacccgcacggaggaccgcatcgtgtggaaaacactagccggcgacccatggataaaaacactgactgccaagtaccctgggaatttcactgccacgatagaggagtggcaagcagagcatgatgccatcatgaggcacatcttggagagaccggaccctaccgacgtcttccagaataaggcaaacgtgtgttgggccaaggctttagtgccggtgctgaagaccgctggcatagacatgaccactgaacaatggaacactgtggattattttgaaacggacaaagctcactcagcagagatagtattgaaccaactatgcgtgaggttctttggactcgatctggactccggtctattttctgcacccactgttccgttatccattaggaataatcactgggataactccccgtcgcctaacatgtacgggctgaataaagaagtggtccgtcagctctctcgcaggtacccacaactgcctcgggcagttgccactggaagagtctatgacatgaacactggtacactgcgcaattatgatccgcgcataaacctagtacctgtaaacagaagactgcctcatgctttagtcctccaccataatgaacacccacagagtgacttttcttcattcgtcagcaaattgaagggcagaactgtcctggtggtcggggaaaagttgtccgtcccaggcaaaatggttgactggttgtcagaccggcctgaggctaccttcagagctcggctggatttaggcatcccaggtgatgtgcccaaatatgacataatatttgttaatgtgaggaccccatataaataccatcactatcagcagtgtgaagaccatgccattaagcttagcatgttgaccaagaaagcttgtctgcatctgaatcccggcggaacctgtgtcagcataggttatggttacgctgacagggccagcgaaagcatcattggtgctatagcgcggcagttcaagttttcccgggtatgcaaaccgaaatcctcacttgaagagacggaagttctgtttgtattcattgggtacgatcgcaaggcccgtacgcacaatccttacaagctttcatcaaccttgaccaacatttatacaggttccagactccacgaagccggatgtgcaccctcatatcatgtggtgcgaggggatattgccacggccaccgaaggagtgattataaatgctgctaacagcaaaggacaacctggcggaggggtgtgcggagcgctgtataagaaattcccggaaagcttcgatttacagccgatcgaagtaggaaaagcgcgactggtcaaaggtgcagctaaacatatcattcatgccgtaggaccaaacttcaacaaagtttcggaggttgaaggtgacaaacagttggcagaggcttatgagtccatcgctaagattgtcaacgataacaattacaagtcagtagcgattccactgttgtccaccggcatcttttccgggaacaaagatcgactaacccaatcattgaaccatttgctgacagctttagacaccactgatgcagatgtagccatatactgcagggacaagaaatgggaaatgactctcaaggaagcagtggctaggagagaagcagtggaggagatatgcatatccgacgactcttcagtgacagaacctgatgcagagctggtgagggtgcatccgaagagttctttggctggaaggaagggctacagcacaagcgatggcaaaactttctcatatttggaagggaccaagtttcaccaggcggccaaggatatagcagaaattaatgccatgtggcccgttgcaacggaggccaatgagcaggtatgcatgtatatcctcggagaaagcatgagcagtattaggtcgaaatgccccgtcgaagagtcggaagcctccacaccacctagcacgctgccttgcttgtgcatccatgccatgactccagaaagagtacagcgcctaaaagcctcacgtccagaacaaattactgtgtgctcatcctttccattgccgaagtatagaatcactggtgtgcagaagatccaatgctcccagcctatattgttctcaccgaaagtgcctgcgtatattcatccaaggaagtatctcgtggaaacaccaccggtagacgagactccggagccatcggcagagaaccaatccacagaggggacacctgaacaaccaccacttataaccgaggatgagaccaggactagaacgcctgagccgatcatcatcgaagaggaagaagaggatagcataagtttgctgtcagatggcccgacccaccaggtgctgcaagtcgaggcagacattcacgggccgccctctgtatctagctcatcctggtccattcctcatgcatccgactttgatgtggacagtttatccatacttgacaccctggagggagctagcgtgaccagcggggcaacgtcagccgagactaactcttacttcgcaaagagtatggagtttctggcgcgaccggtgcctgcgcctcgaacagtattcaggaaccctccacatcccgctccgcgcacaagaacaccgtcacttgcacccagcagggcctgctcgagaaccagcctagtttccaccccgccaggcgtgaatagggtgatcactagagaggagctcgaggcgcttaccccgtcacgcactcctagcaggtcggtctcgagaaccagcctggtctccaacccgccaggcgtaaatagggtgattacaagagaggagtttgaggcgttcgtagcacaacaacaatgacggtttgatgcgggtgcatacatcttttcctccgacaccggtcaagggcatttacaacaaaaatcagtaaggcaaacggtgctatccgaagtggtgttggagaggaccgaattggagatttcgtatgccccgcgcctcgaccaagaaaaagaagaattactacgcaagaaattacagttaaatcccacacctgctaacagaagcagataccagtccaggaaggtggagaacatgaaagccataacagctagacgtattctgcaaggcctagggcattatttgaaggcagaaggaaaagtggagtgctaccgaaccctgcatcctgttcctttgtattcatctagtgtgaaccgtgccttttcaagccccaaggtcgcagtggaagcctgtaacgccatgttgaaagagaactttccgactgtggcttcttactgtattattccagagtacgatgcctatttggacatggttgacggagcttcatgctgcttagacactgccagtttttgccctgcaaagctgcgcagctttccaaagaaacactcctatttggaacccacaatacgatcggcagtgccttcagcgatccagaacacgctccagaacgtcctggcagctgccacaaaaagaaattgcaatgtcacgcaaatgagagaattgcccgtattggattcggcggcctttaatgtggaatgcttcaagaaatatgcgtgtaataatgaatattgggaaacgtttaaagaaaaccccatcaggcttactgaagaaaacgtggtaaattacattaccaaattaaaaggaccaaaagctgctgctctttttgcgaagacacataatttgaatatgttgcaggacataccaatggacaggtttgtaatggacttaaagagagacgtgaaagtgactccaggaacaaaacatactgaagaacggcccaaggtacaggtgatccaggctgccgatccgctagcaacagcgtatctgtgcggaatccaccgagagctggttaggagattaaatgcggtcctgcttccgaacattcatacactgtttgatatgtcggctgaagactttgacgctattatagccgagcacttccagcctggggattgtgttctggaaactgacatcgcgtcgtttgataaaagtgaggacgacgccatggctctgaccgcgttaatgattctggaagacttaggtgtggacgcagagctgttgacgctgattgaggcggctttcggcgaaatttcatcaatacatttgcccactaaaactaaatttaaattcggagccatgatgaaatctggaatgttcctcacactgtttgtgaacacagtcattaacattgtaatcgcaagcagagtgttgagagaacggctaaccggatcaccatgtgcagcattcattggagatgacaatatcgtgaaaggagtcaaatcggacaaattaatggcagacaggtgcgccacctggttgaatatggaagtcaagattatagatgctgtggtgggcgagaaagcgccttatttctgtggagggtttattttgtgtgactccgtgaccggcacagcgtgccgtgtggcagaccccctaaaaaggctgtttaagcttggcaaacctctggcagcagacgatgaacatgatgatgacaggagaagggcattgcatgaagagtcaacacgctggaaccgagtgggtattctttcagagctgtgcaaggcagtagaatcaaggtatgaaaccgtaggaacttccatcatagttatggccatgactactctagctagcagtgttaaatcattcagctacctgagaggggcccctataactctctacggctaacctgaatggactacgactctagaatagtctttaattaaagtccgccatatgaggccaccatgcagatcttcgtgaagaccctgaccggcaagaccatcaccctagaggtggagcccagtgacaccatcgagaacgtgaaggccaagatccaggataaagagggcatcccccctgaccagcagaggctgatctttgccggcaagcagctggaagatggccgcaccctctctgattacaacatccagaaggagtcaaccctgcacctggtccttcgcctgagaggtggcgctgcttacagtataatcaactttgaaaaactggctgcttacggcatcctgggctttgtgtttacactggctgcctacctgctgtttggctatcctgtgtacgtggccgcttatggactgtgtaccctggtggccatgctggctgcttacaatctggtgcctatggtggccacagtggccgcctattgtcttggcggactgctgacaatggtggcagcctacagcccgagctatgcgtatcatcagtttgcagcctacggcccaggaccaggcgctaaatttgtggctgcctggacactgaaagccgccgctggaccaggtcctggacagtacatcaaggccaacagcaagttcatcggcatcaccgaactcggcccaggaccaggctatccctacgatgtgcctgattacgcctgatagtgatgattcgaacggccgtatcacgcccaaacatttacagccgcggtgtcaaaaaccgcgtggacgtggttaacatccctgctgggaggatcagccgtaattattataattggcttggtgctggctactattgtggccatgtacgtgctgaccaaccagaaacataattgaatacagcagcaattggcaagctgcttacatagaactcgcggcgattggcatgccgccttaaaatttttattttattttttcttttcttttccgaatcggattttgtttttaatatttcaaaaaaaaaaaaaaaaaaaaaaaaaaaaaaaaaaaaaaaaaaaaaaaaaaaaaaaaaaaaaaaaaaaaaaaaaaaaaaaa

SEQ ID NO: 15 - DNA, 9595 bp, Artificial Sequence
  Description of Artificial Sequence: Synthetic polynucleotide
atgggcggcgcatgagagaagcccagaccaattacctacccaaaatggagaaagttcacgttgacatcgaggaagacagcccattcctcagagctttgcagcggagcttcccgcagtttgaggtagaagccaagcaggtcactgataatgaccatgctaatgccagagcgttttcgcatctggcttcaaaactgatcgaaacggaggtggacccatccgacacgatccttgacattggaagtgcgcccgcccgcagaatgtattctaagcacaagtatcattgtatctgtccgatgagatgtgcggaagatccggacagattgtataagtatgcaactaagctgaagaaaaactgtaaggaaataactgataaggaattggacaagaaaatgaaggagctcgccgccgtcatgagcgaccctgacctggaaactgagactatgtgcctccacgacgacgagtcgtgtcgctacgaagggcaagtcgctgtttaccaggatgtatacgcggttgacggaccgacaagtctctatcaccaagccaataagggagttagagtcgcctactggataggctttgacaccaccccttttatgtttaagaacttggctggagcatatccatcatactctaccaactgggccgacgaaaccgtgttaacggctcgtaacataggcctatgcagctctgacgttatggagcggtcacgtagagggatgtccattcttagaaagaagtatttgaaaccatccaacaatgttctattctctgttggctcgaccatctaccacgagaagagggacttactgaggagctggcacctgccgtctgtatttcacttacgtggcaagcaaaattacacatgtcggtgtgagactatagttagttgcgacgggtacgtcgttaaaagaatagctatcagtccaggcctgtatgggaagccttcaggctatgctgctacgatgcaccgcgagggattcttgtgctgcaaagtgacagacacattgaacggggagagggtctcttttcccgtgtgcacgtatgtgccagctacattgtgtgaccaaatgactggcatactggcaacagatgtcagtgcggacgacgcgcaaaaactgctggttgggctcaaccagcgtatagtcgtcaacggtcgcacccagagaaacaccaataccatgaaaaattaccttttgcccgtagtggcccaggcatttgctaggtgggcaaaggaatataaggaagatcaagaagatgaaaggccactaggactacgagatagacagttagtcatggggtgttgttgggcttttagaaggcacaagataacatctatttataagcgcccggatacccaaaccatcatcaaagtgaacagcgatttccactcattcgtgctgcccaggataggcagtaacacattggagatcgggctgagaacaagaatcaggaaaatgttagaggagcacaaggagccgtcacctctcattaccgccgaggacgtacaagaagctaagtgcgcagccgatgaggctaaggaggtgcgtgaagccgaggagttgcgcgcagctctaccacctttggcagctgatgttgaggagcccactctggaagccgatgtcgacttgatgttacaagaggctggggccggctcagtggagacacctcgtggcttgataaaggttaccagctacgctggcgaggacaagatcggctcttacgctgtgctttctccgcaggctgtactcaagagtgaaaaattatcttgcatccaccctctcgctgaacaagtcatagtgataacacactctggccgaaaagggcgttatgccgtggaaccataccatggtaaagtagtggtgccagagggacatgcaatacccgtccaggactttcaagctctgagtgaaagtgccaccattgtgtacaacgaacgtgagttcgtaaacaggtacctgcaccatattgccacacatggaggagcgctgaacactgatgaagaatattacaaaactgtcaagcccagcgagcacgacggcgaatacctgtacgacatcgacaggaaacagtgcgtcaagaaagaactagtcactgggctagggctcacaggcgagctggtggatcctcccttccatgaattcgcctacgagagtctgagaacacgaccagccgctccttaccaagtaccaaccataggggtgtatggcgtgccaggatcaggcaagtctggcatcattaaaagcgcagtcaccaaaaaagatctagtggtgagcgccaagaaagaaaactgtgcagaaattataagggacgtcaagaaaatgaaagggctggacgtcaatgccagaactgtggactcagtgctcttgaatggatgcaaacaccccgtagagaccctgtatattgacgaagcttttgcttgtcatgcaggtactctcagagcgctcatagccattataagacctaaaaaggcagtgctctgcggggatcccaaacagtgcggtttttttaacatgatgtgcctgaaagtgcattttaaccacgagatttgcacacaagtcttccacaaaagcatctctcgccgttgcactaaatctgtgacttcggtcgtctcaaccttgttttacgacaaaaaaatgagaacgacgaatccgaaagagactaagattgtgattgacactaccggcagtaccaaacctaagcaggacgatctcattctcacttgtttcagagggtgggtgaagcagttgcaaatagattacaaaggcaacgaaataatgacggcagctgcctctcaagggctgacccgtaaaggtgtgtatgccgttcggtacaaggtgaatgaaaatcctctgtacgcacccacctcagaacatgtgaacgtcctactgacccgcacggaggaccgcatcgtgtggaaaacactagccggcgacccatggataaaaacactgactgccaagtaccctgggaatttcactgccacgatagaggagtggcaagcagagcatgatgccatcatgaggcacatcttggagagaccggaccctaccgacgtcttccagaataaggcaaacgtgtgttgggccaaggctttagtgccggtgctgaagaccgctggcatagacatgaccactgaacaatggaacactgtggattattttgaaacggacaaagctcactcagcagagatagtattgaaccaactatgcgtgaggttctttggactcgatctggactccggtctattttctgcacccactgttccgttatccattaggaataatcactgggataactccccgtcgcctaacatgtacgggctgaataaagaagtggtccgtcagctctctcgcaggtacccacaactgcctcgggcagttgccactggaagagtctatgacatgaacactggtacactgcgcaattatgatccgcgcataaacctagtacctgtaaacagaagactgcctcatgctttagtcctccaccataatgaacacccacagagtgacttttcttcattcgtcagcaaattgaagggcagaactgtcctggtggtcggggaaaagttgtccgtcccaggcaaaatggttgactggttgtcagaccggcctgaggctaccttcagagctcggctggatttaggcatcccaggtgatgtgcccaaatatgacataatatttgttaatgtgaggaccccatataaataccatcactatcagcagtgtgaagaccatgccattaagcttagcatgttgaccaagaaagcttgtctgcatctgaatcccggcggaacctgtgtcagcataggttatggttacgctgacagggccagcgaaagcatcattggtgctatagcgcggcagttcaagttttcccgggtatgcaaaccgaaatcctcacttgaagagacggaagttctgtttgtattcattgggtacgatcgcaaggcccgtacgcacaatccttacaagctttcatcaaccttgaccaacatttatacaggttccagactccacgaagccggatgtgcaccctcatatcatgtggtgcgaggggatattgccacggccaccgaaggagtgattataaatgctgctaacagcaaaggacaacctggcggaggggtgtgcggagcgctgtataagaaattcccggaaagcttcgatttacagccgatcgaagtaggaaaagcgcgactggtcaaaggtgcagctaaacatatcattcatgccgtaggaccaaacttcaacaaagtttcggaggttgaaggtgacaaacagttggcagaggcttatgagtccatcgctaagattgtcaacgataacaattacaagtcagtagcgattccactgttgtccaccggcatcttttccgggaacaaagatcgactaacccaatcattgaaccatttgctgacagctttagacaccactgatgcagatgtagccatatactgcagggacaagaaatgggaaatgactctcaaggaagcagtggctaggagagaagcagtggaggagatatgcatatccgacgactcttcagtgacagaacctgatgcagagctggtgagggtgcatccgaagagttctttggctggaaggaagggctacagcacaagcgatggcaaaactttctcatatttggaagggaccaagtttcaccaggcggccaaggatatagcagaaattaatgccatgtggcccgttgcaacggaggccaatgagcaggtatgcatgtatatcctcggagaaagcatgagcagtattaggtcgaaatgccccgtcgaagagtcggaagcctccacaccacctagcacgctgccttgcttgtgcatccatgccatgactccagaaagagtacagcgcctaaaagcctcacgtccagaacaaattactgtgtgctcatcctttccattgccgaagtatagaatcactggtgtgcagaagatccaatgctcccagcctatattgttctcaccgaaagtgcctgcgtatattcatccaaggaagtatctcgtggaaacaccaccggtagacgagactccggagccatcggcagagaaccaatccacagaggggacacctgaacaaccaccacttataaccgaggatgagaccaggactagaacgcctgagccgatcatcatcgaagaggaagaagaggatagcataagtttgctgtcagatggcccgacccaccaggtgctgcaagtcgaggcagacattcacgggccgccctctgtatctagctcatcctggtccattcctcatgcatccgactttgatgtggacagtttatccatacttgacaccctggagggagctagcgtgaccagcggggcaacgtcagccgagactaactcttacttcgcaaagagtatggagtttctggcgcgaccggtgcctgcgcctcgaacagtattcaggaaccctccacatcccgctccgcgcacaagaacaccgtcacttgcacccagcagggcctgctcgagaaccagcctagtttccaccccgccaggcgtgaatagggtgatcactagagaggagctcgaggcgcttaccccgtcacgcactcctagcaggtcggtctcgagaaccagcctggtctccaacccgccaggcgtaaatagggtgattacaagagaggagtttgaggcgttcgtagcacaacaacaatgacggtttgatgcgggtgcatacatcttttcctccgacaccggtcaagggcatttacaacaaaaatcagtaaggcaaacggtgctatccgaagtggtgttggagaggaccgaattggagatttcgtatgccccgcgcctcgaccaagaaaaagaagaattactacgcaagaaattacagttaaatcccacacctgctaacagaagcagataccagtccaggaaggtggagaacatgaaagccataacagctagacgtattctgcaaggcctagggcattatttgaaggcagaaggaaaagtggagtgctaccgaaccctgcatcctgttcctttgtattcatctagtgtgaaccgtgccttttcaagccccaaggtcgcagtggaagcctgtaacgccatgttgaaagagaactttccgactgtggcttcttactgtattattccagagtacgatgcctatttggacatggttgacggagcttcatgctgcttagacactgccagtttttgccctgcaaagctgcgcagctttccaaagaaacactcctatttggaacccacaatacgatcggcagtgccttcagcgatccagaacacgctccagaacgtcctggcagctgccacaaaaagaaattgcaatgtcacgcaaatgagagaattgcccgtattggattcggcggcctttaatgtggaatgcttcaagaaatatgcgtgtaataatgaatattgggaaacgtttaaagaaaaccccatcaggcttactgaagaaaacgtggtaaattacattaccaaattaaaaggaccaaaagctgctgctctttttgcgaagacacataatttgaatatgttgcaggacataccaatggacaggtttgtaatggacttaaagagagacgtgaaagtgactccaggaacaaaacatactgaagaacggcccaaggtacaggtgatccaggctgccgatccgctagcaacagcgtatctgtgcggaatccaccgagagctggttaggagattaaatgcggtcctgcttccgaacattcatacactgtttgatatgtcggctgaagactttgacgctattatagccgagcacttccagcctggggattgtgttctggaaactgacatcgcgtcgtttgataaaagtgaggacgacgccatggctctgaccgcgttaatgattctggaagacttaggtgtggacgcagagctgttgacgctgattgaggcggctttcggcgaaatttcatcaatacatttgcccactaaaactaaatttaaattcggagccatgatgaaatctggaatgttcctcacactgtttgtgaacacagtcattaacattgtaatcgcaagcagagtgttgagagaacggctaaccggatcaccatgtgcagcattcattggagatgacaatatcgtgaaaggagtcaaatcggacaaattaatggcagacaggtgcgccacctggttgaatatggaagtcaagattatagatgctgtggtgggcgagaaagcgccttatttctgtggagggtttattttgtgtgactccgtgaccggcacagcgtgccgtgtggcagaccccctaaaaaggctgtttaagcttggcaaacctctggcagcagacgatgaacatgatgatgacaggagaagggcattgcatgaagagtcaacacgctggaaccgagtgggtattctttcagagctgtgcaaggcagtagaatcaaggtatgaaaccgtaggaacttccatcatagttatggccatgactactctagctagcagtgttaaatcattcagctacctgagaggggcccctataactctctacggctaacctgaatggactacgactctagaatagtctttaattaaagtccgccatatgagatggaagatgccaaaaacattaagaagggcccagcgccattctacccactcgaagacgggaccgccggcgagcagctgcacaaagccatgaagcgctacgccctggtgcccggcaccatcgcctttaccgacgcacatatcgaggtggacattacctacgccgagtacttcgagatgagcgttcggctggcagaagctatgaagcgctatgggctgaatacaaaccatcggatcgtggtgtgcagcgagaatagcttgcagttcttcatgcccgtgttgggtgccctgttcatcggtgtggctgtggccccagctaacgacatctacaacgagcgcgagctgctgaacagcatgggcatcagccagcccaccgtcgtattcgtgagcaagaaagggctgcaaaagatcctcaacgtgcaaaagaagctaccgatcatacaaaagatcatcatcatggatagcaagaccgactaccagggcttccaaagcatgtacaccttcgtgacttcccatttgccacccggcttcaacgagtacgacttcgtgcccgagagcttcgaccgggacaaaaccatcgccctgatcatgaacagtagtggcagtaccggattgcccaagggcgtagccctaccgcaccgcaccgcttgtgtccgattcagtcatgcccgcgaccccatcttcggcaaccagatcatccccgacaccgctatcctcagcgtggtgccatttcaccacggcttcggcatgttcaccacgctgggctacttgatctgcggctttcgggtcgtgctcatgtaccgcttcgaggaggagctattcttgcgcagcttgcaagactataagattcaatctgccctgctggtgcccacactatttagcttcttcgctaagagcactctcatcgacaagtacgacctaagcaacttgcacgagatcgccagcggcggggcgccgctcagcaaggaggtaggtgaggccgtggccaaacgcttccacctaccaggcatccgccagggctacggcctgacagaaacaaccagcgccattctgatcacccccgaaggggacgacaagcctggcgcagtaggcaaggtggtgcccttcttcgaggctaaggtggtggacttggacaccggtaagacactgggtgtgaaccagcgcggcgagctgtgcgtccgtggccccatgatcatgagcggctacgttaacaaccccgaggctacaaacgctctcatcgacaaggacggctggctgcacagcggcgacatcgcctactgggacgaggacgagcacttcttcatcgtggaccggctgaagagcctgatcaaatacaagggctaccaggtagccccagccgaactggagagcatcctgctgcaacaccccaacatcttcgacgccggggtcgccggcctgcccgacgacgatgccggcgagctgcccgccgcagtcgtcgtgctggaacacggtaaaaccatgaccgagaaggagatcgtggactatgtggccagccaggttacaaccgccaagaagctgcgcggtggtgttgtgttcgtggacgaggtgcctaaaggactgaccggcaagttggacgcccgcaagatccgcgagattctcattaaggccaagaagggcggcaagatcgccgtgtaattcgaacggccgtatcacgcccaaacatttacagccgcggtgtcaaaaaccgcgtggacgtggttaacatccctgctgggaggatcagccgtaattattataattggcttggtgctggctactattgtggccatgtacgtgctgaccaaccagaaacataattgaatacagcagcaattggcaagctgcttacatagaactcgcggcgattggcatgccgccttaaaatttttattttattttttcttttcttttccgaatcggattttgtttttaatatttcaaaaaaaaaaaaaaaaaaaaaaaaaaaaaaaaaaaaaaaaaaaaaaaaaaaaaaaaaaaaaaaaaaaaaaaaaaaaaaaa

SEQ ID NO: 16 - protein, 139 aa, Artificial Sequence
  Description of Artificial Sequence: Synthetic polypeptide
PSSLSASVGDRVTITCRASQSINSYLDWYQQKPGKAPKLLIYAASSLQSGVPSRFSGSGSGTDFTLTISSLQPEDFATYYCQQYYSTPFTFGPGTKVEIKRTVAAPSVFIFPPSDEQLKSGTASVVCLLNNFYPREAKV

SEQ ID NO: 17 - protein, 167 aa, Artificial Sequence
  Description of Artificial Sequence: Synthetic polypeptide
GVVQPGRSLRLSCAASGFTFSSYGMHWVRQAPGKGLEWVAVIWYDGSNKYYADSVKGRFTISRDNSKNTLYLQMNSLRAEDTAVYYCARDPRGATLYYYYYGMDVWGQGTTVTVSSASTKGPSVFPLAPCSRSTSESTAALGCLVKDYFPEPVTVSWNSGALTSGVH

SEQ ID NO: 18 - protein, 10 aa, Artificial Sequence
  Description of Artificial Sequence: Synthetic peptide
GFTFSSYGMH

SEQ ID NO: 19 - protein, 15 aa, Artificial Sequence
  Description of Artificial Sequence: Synthetic peptide
VIWYDGSNKYYADSV

SEQ ID NO: 20 - protein, 16 aa, Artificial Sequence
  Description of Artificial Sequence: Synthetic peptide
DPRGATLYYYYYGMDV

SEQ ID NO: 21 - protein, 11 aa, Artificial Sequence
  Description of Artificial Sequence: Synthetic peptide
RASQSINSYLD

SEQ ID NO: 22 - protein, 7 aa, Artificial Sequence
  Description of Artificial Sequence: Synthetic peptide
AASSLQS

SEQ ID NO: 23 - protein, 9 aa, Artificial Sequence
  Description of Artificial Sequence: Synthetic peptide
QQYYSTPFT

SEQ ID NO: 24 - protein, 108 aa, Artificial Sequence
  Description of Artificial Sequence: Synthetic polypeptide
EIVLTQSPGTLSLSPGERATLSCRASQRVSSSYLAWYQQKPGQAPRLLIYDASSRATGIPDRFSGSGSGTDFTLTISRLEPEDFAVYYCQQYGSLPWTFGQGTKVEIK

SEQ ID NO: 25 - protein, 121 aa, Artificial Sequence
  Description of Artificial Sequence: Synthetic polypeptide
EVQLVESGGGLVQPGGSLRLSCAASGFTFSRYWMSWVRQAPGKGLEWVANIKQDGSEKYYVDSVKGRFTISRDNAKNSLYLQMNSLRAEDTAVYYCAREGGWFGELAFDYWGQGTLVTVSS

SEQ ID NO: 26 - protein, 5 aa, Artificial Sequence
  Description of Artificial Sequence: Synthetic peptide
RYWMS

SEQ ID NO: 27 - protein, 17 aa, Artificial Sequence
  Description of Artificial Sequence: Synthetic peptide
NIKQDGSEKYYVDSVKG

SEQ ID NO: 28 - protein, 12 aa, Artificial Sequence
  Description of Artificial Sequence: Synthetic peptide
EGGWFGELAFDY

SEQ ID NO: 29 - protein, 12 aa, Artificial Sequence
  Description of Artificial Sequence: Synthetic peptide
RASQRVSSSYLA

SEQ ID NO: 30 - protein, 7 aa, Artificial Sequence
  Description of Artificial Sequence: Synthetic peptide
DASSRAT

SEQ ID NO: 31 - protein, 9 aa, Artificial Sequence
  Description of Artificial Sequence: Synthetic peptide
QQYGSLPWT

SEQ ID NO: 32 - DNA, 2019 bp, Artificial Sequence
  Description of Artificial Sequence: Synthetic polynucleotide
gcccgggcatttaaatgcgatcgcatcgattacgactctagaatagtctagtccgcaggccaccatgcagatcttcgtgaagaccctgaccggcaagaccatcaccctagaggtggagcccagtgacaccatcgagaacgtgaaggccaagatccaggataaagagggcatcccccctgaccagcagaggctgatctttgccggcaagcagctggaagatggccgcaccctctctgattacaacatccagaaggagtcaaccctgcacctggtccttcgcctgagaggtgccatgtttcaggcgctgagcgaaggctgcaccccgtatgatattaaccagatgctgaacgtgctgggcgatcatcaggtctcaggccttgagcagcttgagagtataatcaactttgaaaaactgactgaatggaccagttctaatgttatgcctatcctgtctcctctgacaaagggcatcctgggcttcgtgtttaccctgaccgtgccttctgagagaggacttagctgcattagcgaagcggatgcgaccaccccggaaagcgcgaacctgggcgaagaaattctgagccagctgtatctttggccaagggtgacctaccattcccctagttatgcttaccaccaatttgaaagacgagccaaatataaaagacacttccccggctttggccagagcctgctgtttggctaccctgtgtacgtgttcggcgattgcgtgcagggcgattgggatgcgattcgctttcgctattgcgcgccgccgggctatgcgctgctgcgctgcaacgataccaactatagcgctctgctggctgtgggggccctagaaggacccaggaatcaggactggcttggtgtcccaagacaacttgtaactcggatgcaggctattcagaatgccggcctgtgtaccctggtggccatgctggaagagacaatcttctggctgcaagcgtttctgatggcgctgaccgatagcggcccgaaaaccaacattattgtggatagccagtatgtgatgggcattagcaaaccgagctttcaggaatttgtggattgggaaaacgtgagcccggaactgaacagcaccgatcagccgttttggcaagccggaatcctggccagaaatctggtgcctatggtggccacagtgcagggccagaacctgaagtaccagggtcagtcactagtcatctctgcttctatcattgtcttcaacctgctggaactggaaggtgattatcgagatgatggcaacgtgtgggtgcataccccgctgagcccgcgcaccctgaacgcgtgggtgaaagcggtggaagaaaaaaaaggtattccagttcacctagagctggccagtatgaccaacatggagctcatgagcagtattgtgcatcagcaggtcagaacatacggccccgtgttcatgtgtctcggcggactgcttacaatggtggctggtgctgtgtggctgacagtgcgagtgctcgagctgttccgggccgcgcagctggccaacgacgtggtcctccagatcatggagctttgtggtgcagcgtttcgccaggtgtgccataccaccgtgccgtggccgaacgcgagcctgaccccgaaatggaacaacgaaaccacccagccccagatcgccaactgcagcgtgtatgacttttttgtgtggctccattattattctgttcgagacacactttggccaagggtgacctaccatatgaacaaatatgcgtatcatatgctggaaagacgagccaaatataaaagaggaccaggacctggcgctaaatttgtggccgcctggacactgaaagccgctgctggtcctggacctggccagtacatcaaggccaacagcaagttcatcggcatcaccgaactcggacccggaccaggctgatgatttcgaaatttaaataagcttgcggccgctagggataacagggtaattatcacgcccaaacatttacagccgcggtgtcaaaaaccgcgtgg

SEQ ID NO: 33 - protein, 619 aa, Artificial Sequence
  Description of Artificial Sequence: Synthetic polypeptide
MQIFVKTLTGKTITLEVEPSDTIENVKAKIQDKEGIPPDQQRLIFAGKQLEDGRTLSDYNIQKESTLHLVLRLRGAMFQALSEGCTPYDINQMLNVLGDHQVSGLEQLESIINFEKLTEWTSSNVMPILSPLTKGILGFVFTLTVPSERGLSCISEADATTPESANLGEEILSQLYLWPRVTYHSPSYAYHQFERRAKYKRHFPGFGQSLLFGYPVYVFGDCVQGDWDAIRFRYCAPPGYALLRCNDTNYSALLAVGALEGPRNQDWLGVPRQLVTRMQAIQNAGLCTLVAMLEETIFWLQAFLMALTDSGPKTNIIVDSQYVMGISKPSFQEFVDWENVSPELNSTDQPFWQAGILARNLVPMVATVQGQNLKYQGQSLVISASIIVFNLLELEGDYRDDGNVWVHTPLSPRTLNAWVKAVEEKKGIPVHLELASMTNMELMSSIVHQQVRTYGPVFMCLGGLLTMVAGAVWLTVRVLELFRAAQLANDVVLQIMELCGAAFRQVCHTTVPWPNASLTPKWNNETTQPQIANCSVYDFFVWLHYYSVRDTLWPRVTYHMNKYAYHMLERRAKYKRGPGPGAKFVAAWTLKAAAGPGPGQYIKANSKFIGITELGPGPG

SEQ ID NO: 34 - DNA, 1638 bp, Artificial Sequence
  Description of Artificial Sequence: Synthetic polynucleotide
atggccgggatgttccaggcactgtccgaaggctgcacaccctatgatattaaccagatgctgaatgtcctgggagaccaccaggtctctggcctggagcagctggagagcatcatcaacttcgagaagctgaccgagtggacaagctccaatgtgatgcctatcctgtccccactgaccaagggcatcctgggcttcgtgtttaccctgacagtgccttctgagcggggcctgtcttgcatcagcgaggcagacgcaaccacaccagagtccgccaatctgggcgaggagatcctgtctcagctgtacctgtggccccgggtgacatatcactccccttcttacgcctatcaccagttcgagcggagagccaagtacaagagacacttcccaggctttggccagtctctgctgttcggctaccccgtgtacgtgttcggcgattgcgtgcagggcgactgggatgccatccggtttagatactgcgcaccacctggatatgcactgctgaggtgtaacgacaccaattattccgccctgctggcagtgggcgccctggagggccctcgcaatcaggattggctgggcgtgccaaggcagctggtgacacgcatgcaggccatccagaacgcaggcctgtgcaccctggtggcaatgctggaggagacaatcttctggctgcaggcctttctgatggccctgaccgacagcggccccaagacaaacatcatcgtggattcccagtacgtgatgggcatctccaagccttctttccaggagtttgtggactgggagaacgtgagcccagagctgaattccaccgatcagccattctggcaggcaggaatcctggcaaggaacctggtgcctatggtggccacagtgcagggccagaatctgaagtaccagggccagagcctggtcatcagcgcctccatcatcgtgtttaacctgctggagctggagggcgactatcgggacgatggcaacgtgtgggtgcacaccccactgagccccagaacactgaacgcctgggtgaaggccgtggaggagaagaagggcatcccagtgcacctggagctggcctccatgaccaatatggagctgatgtctagcatcgtgcaccagcaggtgaggacatacggacccgtgttcatgtgcctgggaggcctgctgaccatggtggcaggagccgtgtggctgacagtgcgggtgctggagctgttcagagccgcccagctggccaacgatgtggtgctgcagatcatggagctgtgcggagcagcctttcgccaggtgtgccacaccacagtgccatggcccaatgcctccctgacccccaagtggaacaatgagacaacacagcctcagatcgccaactgtagcgtgtacgacttcttcgtgtggctgcactactatagcgtgagggataccctgtggccccgcgtgacataccacatgaataagtacgcctatcacatgctggagaggcgcgccaagtataagagaggccctggcccaggcgcaaagtttgtggcagcatggaccctgaaggccgccgccggccccggccccggccagtatatcaaggctaacagtaagttcattggaatcacagagctgggacccggacctgga

SEQ ID NO: 35 - protein, 546 aa, Artificial Sequence
  Description of Artificial Sequence: Synthetic polypeptide
MAGMFQALSEGCTPYDINQMLNVLGDHQVSGLEQLESIINFEKLTEWTSSNVMPILSPLTKGILGFVFTLTVPSERGLSCISEADATTPESANLGEEILSQLYLWPRVTYHSPSYAYHQFERRAKYKRHFPGFGQSLLFGYPVYVFGDCVQGDWDAIRFRYCAPPGYALLRCNDTNYSALLAVGALEGPRNQDWLGVPRQLVTRMQAIQNAGLCTLVAMLEETIFWLQAFLMALTDSGPKTNIIVDSQYVMGISKPSFQEFVDWENVSPELNSTDQPFWQAGILARNLVPMVATVQGQNLKYQGQSLVISASIIVFNLLELEGDYRDDGNVWVHTPLSPRTLNAWVKAVEEKKGIPVHLELASMTNMELMSSIVHQQVRTYGPVFMCLGGLLTMVAGAVWLTVRVLELFRAAQLANDVVLQIMELCGAAFRQVCHTTVPWPNASLTPKWNNETTQPQIANCSVYDFFVWLHYYSVRDTLWPRVTYHMNKYAYHMLERRAKYKRGPGPGAKFVAAWTLKAAAGPGPGQYIKANSKFIGITELGPGPG

SEQ ID NO: 36 - DNA, 2019 bp, Artificial Sequence
  Description of Artificial Sequence: Synthetic polynucleotide
gcccgggcatttaaatgcgatcgcatcgattacgactctagaatagtctagtccgcaggccaccatgcagatcttcgtgaagaccctgaccggcaagaccatcaccctagaggtggagcccagtgacaccatcgagaacgtgaaggccaagatccaggataaagagggcatcccccctgaccagcagaggctgatctttgccggcaagcagctggaagatggccgcaccctctctgattacaacatccagaaggagtcaaccctgcacctggtccttcgcctgagaggtgccatgtttcaggcgctgagcgaaggctgcaccccgtatgatattaaccagatgctgaacgtgctgggcgatcatcagtttaagcacatcaaagcctttgaccggacatttgctaacaacccaggtcccatggttgtgtttgccacacctgggcctatcctgtctcctctgacaaagggcatcctgggcttcgtgtttaccctgaccgtgccttctgagagaggacttagctgcattagcgaagcggatgcgaccaccccggaaagcgcgaacctgggcgaagaaattctgagccagctgtatctttggccaagggtgacctaccattcccctagttatgcttaccaccaatttgaaagacgagccaaatataaaagacacttccccggctttggccagagcctgctgtttggctaccctgtgtacgtgttcggcgattgcgtgcagggcgattgggatgcgattcgctttcgctattgcgcgccgccgggctatgcgctgctgcgctgcaacgataccaactatagcgctctgctggctgtgggggccctagaaggacccaggaatcaggactggcttggtgtcccaagacaacttgtaactcggatgcaggctattcagaatgccggcctgtgtaccctggtggccatgctggaagagacaatcttctggctgcaagcgtttctgatggcgctgaccgatagcggcccgaaaaccaacattattgtggatagccagtatgtgatgggcattagcaaaccgagctttcaggaatttgtggattgggaaaacgtgagcccggaactgaacagcaccgatcagccgttttggcaagccggaatcctggccagaaatctggtgcctatggtggccacagtgcagggccagaacctgaagtaccagggtcagtcactagtcatctctgcttctatcattgtcttcaacctgctggaactggaaggtgattatcgagatgatggcaacgtgtgggtgcataccccgctgagcccgcgcaccctgaacgcgtgggtgaaagcggtggaagaaaaaaaaggtattccagttcacctagagctggccagtatgaccaacatggagctcatgagcagtattgtgcatcagcaggtcagaacatacggccccgtgttcatgtgtctcggcggactgcttacaatggtggctggtgctgtgtggctgacagtgcgagtgctcgagctgttccgggccgcgcagctggccaacgacgtggtcctccagatcatggagctttgtggtgcagcgtttcgccaggtgtgccataccaccgtgccgtggccgaacgcgagcctgaccccgaaatggaacaacgaaaccacccagccccagatcgccaactgcagcgtgtatgacttttttgtgtggctccattattattctgttcgagacacactttggccaagggtgacctaccatatgaacaaatatgcgtatcatatgctggaaagacgagccaaatataaaagaggaccaggacctggcgctaaatttgtggccgcctggacactgaaagccgctgctggtcctggacctggccagtacatcaaggccaacagcaagttcatcggcatcaccgaactcggacccggaccaggctgatgatttcgaaatttaaataagcttgcggccgctagggataacagggtaattatcacgcccaaacatttacagccgcggtgtcaaaaaccgcgtgg

SEQ ID NO: 37 - protein, 619 aa, Artificial Sequence
  Description of Artificial Sequence: Synthetic polypeptide
MQIFVKTLTGKTITLEVEPSDTIENVKAKIQDKEGIPPDQQRLIFAGKQLEDGRTLSDYNIQKESTLHLVLRLRGAMFQALSEGCTPYDINQMLNVLGDHQFKHIKAFDRTFANNPGPMVVFATPGPILSPLTKGILGFVFTLTVPSERGLSCISEADATTPESANLGEEILSQLYLWPRVTYHSPSYAYHQFERRAKYKRHFPGFGQSLLFGYPVYVFGDCVQGDWDAIRFRYCAPPGYALLRCNDTNYSALLAVGALEGPRNQDWLGVPRQLVTRMQAIQNAGLCTLVAMLEETIFWLQAFLMALTDSGPKTNIIVDSQYVMGISKPSFQEFVDWENVSPELNSTDQPFWQAGILARNLVPMVATVQGQNLKYQGQSLVISASIIVFNLLELEGDYRDDGNVWVHTPLSPRTLNAWVKAVEEKKGIPVHLELASMTNMELMSSIVHQQVRTYGPVFMCLGGLLTMVAGAVWLTVRVLELFRAAQLANDVVLQIMELCGAAFRQVCHTTVPWPNASLTPKWNNETTQPQIANCSVYDFFVWLHYYSVRDTLWPRVTYHMNKYAYHMLERRAKYKRGPGPGAKFVAAWTLKAAAGPGPGQYIKANSKFIGITELGPGPG

SEQ ID NO: 38 - DNA, 228 bp, Artificial Sequence
  Description of Artificial Sequence: Synthetic polynucleotide
atgcagatcttcgtgaagaccctgaccggcaagaccatcaccctagaggtggagcccagtgacaccatcgagaacgtgaaggccaagatccaggataaagagggcatcccccctgaccagcagaggctgatctttgccggcaagcagctggaagatggccgcaccctctctgattacaacatccagaaggagtcaaccctgcacctggtccttcgcctgagaggtggc

SEQ ID NO: 39 - DNA, 228 bp, Artificial Sequence
  Description of Artificial Sequence: Synthetic polynucleotide
atgcagatcttcgtgaagaccctgaccggcaagaccatcaccctagaggtggagcccagtgacaccatcgagaacgtgaaggccaagatccaggataaagagggcatcccccctgaccagcagaggctgatctttgccggcaagcagctggaagatggccgcaccctctctgattacaacatccagaaggagtcaaccctgcacctggtccttcgcctgagaggtgcc

SEQ ID NO: 40 - DNA, 78 bp, Homo sapiens
atggccgtcatggcgccccgaaccctcgtcctgctactctcgggggctctggccctgacccagacctgggcgggctct

SEQ ID NO: 41 - DNA, 201 bp, Homo sapiens
ccgtcttcccagcccaccatccccatcgtgggcatcattgctggcctggttctctttggagctgtgatcactggagctgtggtcgctgctgtgatgtggaggaggaagagctcagatagaaaaggagggagctactctcaggctgcaagcagtgacagtgcccagggctctgatgtgtctctcacagcttgtaaagtgtga

SEQ ID NO: 42 - DNA, 60 bp, Artificial Sequence
  Description of Artificial Sequence: Synthetic oligonucleotide
atggagaccgatacactgctgctgtgggtgctgctcctgtgggtgccaggaagcacaggc

SEQ ID NO: 43 - DNA, 3178 bp, Homo sapiens
ggcaccgattcggggcctgcccggacttcgccgcacgctgcagaacctcgcccagcgcccaccatgccccggcagctcagcgcggcggccgcgctcttcgcgtccctggccgtaattttgcacgatggcagtcaaatgagagcaaaagcatttccagaaaccagagattattctcaacctactgcagcagcaacagtacaggacataaaaaaacctgtccagcaaccagctaagcaagcacctcaccaaactttagcagcaagattcatggatggtcatatcacctttcaaacagcggccacagtaaaaattccaacaactaccccagcaactacaaaaaacactgcaaccaccagcccaattacctacaccctggtcacaacccaggccacacccaacaactcacacacagctcctccagttactgaagttacagtcggccctagcttagccccttattcactgccacccaccatcaccccaccagctcatacagctggaaccagttcatcaaccgtcagccacacaactgggaacaccactcaacccagtaaccagaccacccttccagcaactttatcgatagcactgcacaaaagcacaaccggtcagaagcctgatcaacccacccatgccccaggaacaacggcagctgcccacaataccacccgcacagctgcacctgcctccacggttcctgggcccacccttgcacctcagccatcgtcagtcaagactggaatttatcaggttctaaacggaagcagactctgtataaaagcagagatggggatacagctgattgttcaagacaaggagtcggttttttcacctcggagatacttcaacatcgaccccaacgcaacgcaagcctctgggaactgtggcacccgaaaatccaaccttctgttgaattttcagggcggatttgtgaatctcacatttaccaaggatgaagaatcatattatatcagtgaagtgggagcctatttgaccgtctcagatccagagacagtttaccaaggaatcaaacatgcggtggtgatgttccagacagcagtcgggcattccttcaagtgcgtgagtgaacagagcctccagttgtcagcccacctgcaggtgaaaacaaccgatgtccaacttcaagcctttgattttgaagatgaccactttggaaatgtggatgagtgctcgtctgactacacaattgtgcttcctgtgattggggccatcgtggttggtctctgccttatgggtatgggtgtctataaaatccgcctaaggtgtcaatcatctggataccagagaatctaattgttgcccggggggaatgaaaataatggaatttagagaactctttcatcccttccaggatggatgttgggaaattccctcagagtgtgggtccttcaaacaatgtaaaccaccatcttctattcaaatgaagtgagtcatgtgtgatttaagttcaggcagcacatcaatttctaaatactttttgtttattttatgaaagatatagtgagctgtttattttctagtttcctttagaatattttagccactcaaagtcaacatttgagatatgttgaattaacataatatatgtaaagtagaataagccttcaaattataaaccaagggtcaattgtaactaatactactgtgtgtgcattgaagattttattttacccttgatcttaacaaagcctttgctttgttatcaaatggactttcagtgcttttactatctgtgttttatggtttcatgtaacatacatattcctggtgtagcacttaactccttttccactttaaatttgtttttgttttttgagacggagtttcactcttgtcacccaggctggagtacagtggcacgatctcggcttatggcaacctccgcctcccgggttcaagtgattctcctgcttcagcttcccgagtagctgggattacaggcacacactaccacgcctggctaatttttgtatttttattatagacgggtttcaccatgttggccagactggtcttgaactcttgacctcaggtgatccacccacctcagcctcccaaagtgctgggattacaggcatgagccattgcgcccggccttaaatgttttttttaatcatcaaaaagaacaacatatctcaggttgtctaagtgtttttatgtaaaaccaacaaaaagaacaaatcagcttatattttttatcttgatgactcctgctccagaattgctagactaagaattaggtggctacagatggtagaactaaacaataagcaagagacaataataatggcccttaattattaacaaagtgccagagtctaggctaagcactttatctatatctcatttcattctcacaacttataagtgaatgagtaaactgagacttaagggaactgaatcacttaaatgtcacctggctaactgatggcagagccagagcttgaattcatgttggtctgacatcaaggtctttggtcttctccctacaccaagttacctacaagaacaatgacaccacactctgcctgaaggctcacacctcataccagcatacgctcaccttacagggaaatgggtttatccaggatcatgagacattagggtagatgaaaggagagctttgcagataacaaaatagcctatccttaataaatcctccactctctggaaggagactgaggggctttgtaaaacattagtcagttgctcatttttatgggattgcttagctgggctgtaaagatgaaggcatcaaataaactcaaagtatttttaaatttttttgataatagagaaacttcgctaaccaactgttctttcttgagtgtatagccccatcttgtggtaacttgctgcttctgcacttcatatccatatttcctattgttcactttattctgtagagcagcctgccaagaattttatttctgctgttttttttgctgctaaagaaaggaactaagtcaggatgttaacagaaaagtccacataaccctagaattcttagtcaaggaataattcaagtcagcctagagaccatgttgactttcctcatgtgtttccttatgactcagtaagttggcaaggtcctgactttagtcttaataaaacattgaattgtagtaaaggtttttgcaataaaaacttactttgg

SEQ ID NO: 44 - DNA, 1858 bp, Mus sp.
attccggaggtgaaaaacaatggcacaacgtgtataatggccagcttctctgcctcctttctgaccacctacgagactgcgaatggttctcagatcgtgaacatttccctgccagcctctgcagaagtactgaaaaatggcagttcttgtggtaaagaaaatgtttctgaccccagcctcacaattacttttggaagaggatatttactgacactcaacttcacaaaaaatacaacacgttacagtgtccagcatatgtattttacatataacttgtcagatacagaacattttcccaatgccatcagcaaagagatctacaccatggattccacaactgacatcaaggcagacatcaacaaagcataccggtgtgtcagtgatatccgggtctacatgaagaatgtgaccgttgtgctccgggatgccactatccaggcctacctgtcgagtggcaacttcagcaaggaagagacacactgcacacaggatggaccttccccaaccactgggccacccagcccctcaccaccacttgtgcccacaaaccccactgtatccaagtacaatgttactggtaacaacggaacctgcctgctggcctctatggcactgcaactgaatatcacctacctgaaaaaggacaacaagacggtgaccagagcgttcaacatcagcccaaatgacacatctagtgggagttgcggtatcaacttggtgaccctgaaagtggagaacaagaacagagccctggaattgcagtttgggatgaatgccagctctagcctgtttttcttgcaaggagtgcgcttgaatatgactcttcctgatgccctagtgcccacattcagcatctccaaccattcactgaaagctcttcaggccactgtgggaaactcatacaagtgcaacactgaggaacacatctttgtcagcaagatgctctccctcaatgtcttcagtgtgcaggtccaggctttcaaggtggacagtgacaggtttgggtctgtggaagagtgtgttcaggatggtaacaacatgttgatccccattgctgtgggcggtgccctggcagggctgatcctcatcgtcctcattgcctacctcattggcaggaagaggagtcacgccggctatcagaccatctagcctggtgggcaggtgcaccagagatgcacaggggcctgttctcacatccccaagcttagataggtgtggaagggaggcacactttctggcaaactgttttaaaatctgctttatcaaatgtgaagttcatcttgcaacatttactatgcacaaaggaataactattgaaatgacggtgttaattttgctaactgggttaaatattgatgagaaggctccactgatttgacttttaagacttggtgtttggttcttcattcttttactcagatttaagcctatcaaagggatactctggtccagaccttggcctggcaagggtggctgatggttaggctgcacacacttaagaagcaacgggagcagggaaggcttgcacacaggcacgcacagggtcaacctctggacacttggcttgggctacctggccttgggggggctgaactctggcatctggctgggtacacacccccccaatttctgtgctctgccacccgtgagctgccactttcctaaatagaaaatggcattatttttatttacttttttgtaaagtgatttccagtcttgtgttggcgttcagggtggccctgtctctgcactgtgtacaataatagattcacactgctgacgtgtcttgcagcgtaggtgggttgtacactgggcatcagctcacgtaatgcattgcctgtaacgatgctaataaaaa

SEQ ID NO: 45 - DNA, 2339 bp, Homo sapiens
ggcccaaccgccgcccgcgcccccgctctccgcaccgtacccggccgcctcgcgccatggcggcccccggcagcgcccggcgacccctgctgctgctactgctgttgctgctgctcggcctcatgcattgtgcgtcagcagcaatgtttatggtgaaaaatggcaacgggaccgcgtgcataatggccaacttctctgctgccttctcagtgaactacgacaccaagagtggccctaagaacatgacctttgacctgccatcagatgccacagtggtgctcaaccgcagctcctgtggaaaagagaacacttctgaccccagtctcgtgattgcttttggaagaggacatacactcactctcaatttcacgagaaatgcaacacgttacagcgtccagctcatgagttttgtttataacttgtcagacacacaccttttccccaatgcgagctccaaagaaatcaagactgtggaatctataactgacatcagggcagatatagataaaaaatacagatgtgttagtggcacccaggtccacatgaacaacgtgaccgtaacgctccatgatgccaccatccaggcgtacctttccaacagcagcttcagcaggggagagacacgctgtgaacaagacaggccttccccaaccacagcgccccctgcgccacccagcccctcgccctcacccgtgcccaagagcccctctgtggacaagtacaacgtgagcggcaccaacgggacctgcctgctggccagcatggggctgcagctgaacctcacctatgagaggaaggacaacacgacggtgacaaggcttctcaacatcaaccccaacaagacctcggccagcgggagctgcggcgcccacctggtgactctggagctgcacagcgagggcaccaccgtcctgctcttccagttcgggatgaatgcaagttctagccggtttttcctacaaggaatccagttgaatacaattcttcctgacgccagagaccctgcctttaaagctgccaacggctccctgcgagcgctgcaggccacagtcggcaattcctacaagtgcaacgcggaggagcacgtccgtgtcacgaaggcgttttcagtcaatatattcaaagtgtgggtccaggctttcaaggtggaaggtggccagtttggctctgtggaggagtgtctgctggacgagaacagcatgctgatccccatcgctgtgggtggtgccctggcggggctggtcctcatcgtcctcatcgcctacctcgtcggcaggaagaggagtcacgcaggctaccagactatctagcctggtgcacgcaggcacagcagctgcaggggcctctgttcctttctctgggcttagggtcctgtcgaaggggaggcacactttctggcaaacgtttctcaaatctgcttcatccaatgtgaagttcatcttgcagcatttactatgcacaacagagtaactatcgaaatgacggtgttaattttgctaactgggttaaatattttgctaactggttaaacattaatatttaccaaagtaggattttgagggtgggggtgctctctctgagggggtgggggtgccgctgtctctgaggggtgggggtgccgctgtctctgaggggtgggggtgccgctctctctgagggggtgggggtgccgctttctctgagggggtgggggtgccgctctctctgagggggtgggggtgctgctctctccgaggggtggaatgccgctgtctctgaggggtgggggtgccgctctaaattggctccatatcatttgagtttagggttctggtgtttggtttcttcattctttactgcactcagatttaagccttacaaagggaaagcctctggccgtcacacgtaggacgcatgaaggtcactcgtggtgaggctgacatgctcacacattacaacagtagagagggaaaatcctaagacagaggaactccagagatgagtgtctggagcgcttcagttcagctttaaaggccaggacgggccacacgtggctggcggcctcgttccagtggcggcacgtccttgggcgtctctaatgtctgcagctcaagggctggcacttttttaaatataaaaatgggtgttatttttatttttttttgtaaagtgatttttggtcttctgttgacattcggggtgatcctgttctgcgctgtgtacaatgtgagatcggtgcgttctcctgatgttttgccgtggcttggggattgtacacgggaccagctcacgtaatgcattgcctgtaacaatgtaataaaaagcctctttcttttaaaaaaaaaaaaaaaaaaaaaaaa

SEQ ID NO: 46 - DNA, 45 bp, Artificial Sequence
  Description of Artificial Sequence: Synthetic oligonucleotide
cagtacatcaaggccaacagcaagttcatcggcatcaccgaactc

SEQ ID NO: 47 - protein, 15 aa, Artificial Sequence
  Description of Artificial Sequence: Synthetic peptide
QYIKANSKFIGITEL

SEQ ID NO: 48 - DNA, 39 bp, Artificial Sequence
  Description of Artificial Sequence: Synthetic oligonucleotide
gctaaatttgtggctgcctggacactgaaagccgccgct

SEQ ID NO: 49 - protein, 13 aa, Artificial Sequence
  Description of Artificial Sequence: Synthetic peptide
AKFVAAWTLKAAA

SEQ ID NO: 50 - DNA, 593 bp, Woodchuck hepatitis virus
aatcaacctctggattacaaaatttgtgaaagattgactggtattcttaactatgttgctccttttacgctatgtggatacgctgctttaatgcctttgtatcatgctattgcttcccgtatggctttcattttctcctccttgtataaatcctggttgctgtctctttatgaggagttgtggcccgttgtcaggcaacgtggcgtggtgtgcactgtgtttgctgacgcaacccccactggttggggcattgccaccacctgtcagctcctttccgggactttcgctttccccctccctattgccacggcggaactcatcgccgcctgccttgcccgctgctggacaggggctcggctgttgggcactgacaattccgtggtgttgtcggggaagctgacgtcctttccatggctgctcgcctgtgttgccacctggattctgcgcgggacgtccttctgctacgtcccttcggccctcaatccagcggaccttccttcccgcggcctgctgccggctctgcggcctcttccgcgtcttcgccttcgccctcagacgagtcggatctccctttgggccgcctccccgcctgt

SEQ ID NO: 51 - DNA, 589 bp, Artificial Sequence
  Description of Artificial Sequence: Synthetic polynucleotide
tctcccccccccccctctccctcccccccccctaacgttactggccgaagccgcttggaataaggccggtgtgcgtttgtctatatgttattttccaccatattgccgtcttttggcaatgtgagggcccggaaacctggccctgtcttcttgacgagcattcctaggggtctttcccctctcgccaaaggaatgcaaggtctgttgaatgtcgtgaaggaagcagttcctctggaagcttcttgaagacaaacaacgtctgtagcgaccctttgcaggcagcggaaccccccacctggcgacaggtgcctctgcggccaaaagccacgtgtataagatacacctgcaaaggcggcacaaccccagtgccacgttgtgagttggatagttgtggaaagagtcaaatggctctcctcaagcgtattcaacaaggggctgaaggatgcccagaaggtaccccattgtatgggatctgatctggggcctcggtgcacatgctttacatgtgtttagtcgaggttaaaaaaacgtctaggccccccgaaccacggggacgtggttttcctttgaaaaacacgatgataatatg

SEQ ID NO: 52 - DNA, 720 bp, Artificial Sequence
  Description of Artificial Sequence: Synthetic polynucleotide
atggtgagcaagggcgaggagctgttcaccggggtggtgcccatcctggtcgagctggacggcgacgtaaacggccacaagttcagcgtgtccggcgagggcgagggcgatgccacctacggcaagctgaccctgaagttcatctgcaccaccggcaagctgcccgtgccctggcccaccctcgtgaccaccctgacctacggcgtgcagtgcttcagccgctaccccgaccacatgaagcagcacgacttcttcaagtccgccatgcccgaaggctacgtccaggagcgcaccatcttcttcaaggacgacggcaactacaagacccgcgccgaggtgaagttcgagggcgacaccctggtgaaccgcatcgagctgaagggcatcgacttcaaggaggacggcaacatcctggggcacaagctggagtacaactacaacagccacaacgtctatatcatggccgacaagcagaagaacggcatcaaggtgaacttcaagatccgccacaacatcgaggacggcagcgtgcagctcgccgaccactaccagcagaacacccccatcggcgacggccccgtgctgctgcccgacaaccactacctgagcacccagtccgccctgagcaaagaccccaacgagaagcgcgatcacatggtcctgctggagttcgtgaccgccgccgggatcactctcggcatggacgagctgtacaagtag

SEQ ID NO: 53 - DNA, 1563 bp, Artificial Sequence
  Description of Artificial Sequence: Synthetic polynucleotide
atgctgctgctgctgctgctgctgggcctgaggctacagctctccctgggcatcatcccagttgaggaggagaacccggacttctggaaccgcgaggcagccgaggccctgggtgccgccaagaagctgcagcctgcacagacagccgccaagaacctcatcatcttcctgggcgatgggatgggggtgtctacggtgacagctgccaggatcctaaaagggcagaagaaggacaaactggggcctgagatacccctggccatggaccgcttcccatatgtggctctgtccaagacatacaatgtagacaaacatgtgccagacagtggagccacagccacggcctacctgtgcggggtcaagggcaacttccagaccattggcttgagtgcagccgcccgctttaaccagtgcaacacgacacgcggcaacgaggtcatctccgtgatgaatcgggccaagaaagcagggaagtcagtgggagtggtaaccaccacacgagtgcagcacgcctcgccagccggcacctacgcccacacggtgaaccgcaactggtactcggacgccgacgtgcctgcctcggcccgccaggaggggtgccaggacatcgctacgcagctcatctccaacatggacattgacgtgatcctaggtggaggccgaaagtacatgtttcgcatgggaaccccagaccctgagtacccagatgactacagccaaggtgggaccaggctggacgggaagaatctggtgcaggaatggctggcgaagcgccagggtgcccggtatgtgtggaaccgcactgagctcatgcaggcttccctggacccgtctgtgacccatctcatgggtctctttgagcctggagacatgaaatacgagatccaccgagactccacactggacccctccctgatggagatgacagaggctgccctgcgcctgctgagcaggaacccccgcggcttcttcctcttcgtggagggtggtcgcatcgaccatggtcatcatgaaagcagggcttaccgggcactgactgagacgatcatgttcgacgacgccattgagagggcgggccagctcaccagcgaggaggacacgctgagcctcgtcactgccgaccactcccacgtcttctccttcggaggctaccccctgcgagggagctccatcttcgggctggcccctggcaaggcccgggacaggaaggcctacacggtcctcctatacggaaacggtccaggctatgtgctcaaggacggcgcccggccggatgttaccgagagcgagagcgggagccccgagtatcggcagcagtcagcagtgcccctggacgaagagacccacgcaggcgaggacgtggcggtgttcgcgcgcggcccgcaggcgcacctggttcacggcgtgcaggagcagaccttcatagcgcacgtcatggccttcgccgcctgcctggagccctacaccgcctgcgacctggcgccccccgccggcaccaccgacgccgcgcacccgggttactctagagtcggggcggccggccgcttcgagcagacatgataa

SEQ ID NO: 54 - DNA, 1653 bp, Artificial Sequence
  Description of Artificial Sequence: Synthetic polynucleotide
atggaagatgccaaaaacattaagaagggcccagcgccattctacccactcgaagacgggaccgccggcgagcagctgcacaaagccatgaagcgctacgccctggtgcccggcaccatcgcctttaccgacgcacatatcgaggtggacattacctacgccgagtacttcgagatgagcgttcggctggcagaagctatgaagcgctatgggctgaatacaaaccatcggatcgtggtgtgcagcgagaatagcttgcagttcttcatgcccgtgttgggtgccctgttcatcggtgtggctgtggccccagctaacgacatctacaacgagcgcgagctgctgaacagcatgggcatcagccagcccaccgtcgtattcgtgagcaagaaagggctgcaaaagatcctcaacgtgcaaaagaagctaccgatcatacaaaagatcatcatcatggatagcaagaccgactaccagggcttccaaagcatgtacaccttcgtgacttcccatttgccacccggcttcaacgagtacgacttcgtgcccgagagcttcgaccgggacaaaaccatcgccctgatcatgaacagtagtggcagtaccggattgcccaagggcgtagccctaccgcaccgcaccgcttgtgtccgattcagtcatgcccgcgaccccatcttcggcaaccagatcatccccgacaccgctatcctcagcgtggtgccatttcaccacggcttcggcatgttcaccacgctgggctacttgatctgcggctttcgggtcgtgctcatgtaccgcttcgaggaggagctattcttgcgcagcttgcaagactataagattcaatctgccctgctggtgcccacactatttagcttcttcgctaagagcactctcatcgacaagtacgacctaagcaacttgcacgagatcgccagcggcggggcgccgctcagcaaggaggtaggtgaggccgtggccaaacgcttccacctaccaggcatccgccagggctacggcctgacagaaacaaccagcgccattctgatcacccccgaaggggacgacaagcctggcgcagtaggcaaggtggtgcccttcttcgaggctaaggtggtggacttggacaccggtaagacactgggtgtgaaccagcgcggcgagctgtgcgtccgtggccccatgatcatgagcggctacgttaacaaccccgaggctacaaacgctctcatcgacaaggacggctggctgcacagcggcgacatcgcctactgggacgaggacgagcacttcttcatcgtggaccggctgaagagcctgatcaaatacaagggctaccaggtagccccagccgaactggagagcatcctgctgcaacaccccaacatcttcgacgccggggtcgccggcctgcccgacgacgatgccggcgagctgcccgccgcagtcgtcgtgctggaacacggtaaaaccatgaccgagaaggagatcgtggactatgtggccagccaggttacaaccgccaagaagctgcgcggtggtgttgtgttcgtggacgaggtgcctaaaggactgaccggcaagttggacgcccgcaagatccgcgagattctcattaaggccaagaagggcggcaagatcgccgtgtaa

SEQ ID NO: 55 - DNA, 66 bp, Foot-and-mouth disease virus
gtaaagcaaacactgaactttgaccttctcaagttggctggagacgttgagtccaatcctgggccc

SEQ ID NO: 56 - protein, 5 aa, Artificial Sequence
  Description of Artificial Sequence: Synthetic peptide
GPGPG

SEQ ID NO: 57 - protein, 5 aa, Artificial Sequence
  Description of Artificial Sequence: Synthetic peptide
GPGPG

SEQ ID NO: 58 - protein, 5 aa, Artificial Sequence
  Description of Artificial Sequence: Synthetic peptide
GPGPG

SEQ ID NO: 59 - protein, 5 aa, Artificial Sequence
  Description of Artificial Sequence: Synthetic peptide
GPGPG

SEQ ID NO: 60 - protein, 5 aa, Artificial Sequence
  Description of Artificial Sequence: Synthetic peptide
GPGPG

SEQ ID NO: 61 - protein, 5 aa, Artificial Sequence
  Description of Artificial Sequence: Synthetic peptide
GPGPG

SEQ ID NO: 62 - protein, 5 aa, Artificial Sequence
  Description of Artificial Sequence: Synthetic peptide
GPGPG

SEQ ID NO: 63 - protein, 5 aa, Artificial Sequence
  Description of Artificial Sequence: Synthetic peptide
GPGPG

SEQ ID NO: 64 - protein, 5 aa, Artificial Sequence
  Description of Artificial Sequence: Synthetic peptide
GPGPG

SEQ ID NO: 65 - protein, 5 aa, Artificial Sequence
  Description of Artificial Sequence: Synthetic peptide
GPGPG

SEQ ID NO: 66 - protein, 5 aa, Artificial Sequence
  Description of Artificial Sequence: Synthetic peptide
GPGPG

SEQ ID NO: 67 - protein, 5 aa, Artificial Sequence
  Description of Artificial Sequence: Synthetic peptide
GPGPG

SEQ ID NO: 68 - protein, 5 aa, Artificial Sequence
  Description of Artificial Sequence: Synthetic peptide
GPGPG

SEQ ID NO: 69 - protein, 5 aa, Artificial Sequence
  Description of Artificial Sequence: Synthetic peptide
GPGPG

SEQ ID NO: 70 - protein, 5 aa, Artificial Sequence
  Description of Artificial Sequence: Synthetic peptide
GPGPG

SEQ ID NO: 71 - protein, 5 aa, Artificial Sequence
  Description of Artificial Sequence: Synthetic peptide
GPGPG

SEQ ID NO: 72 - protein, 5 aa, Artificial Sequence
  Description of Artificial Sequence: Synthetic peptide
GPGPG

SEQ ID NO: 73 - protein, 5 aa, Artificial Sequence
  Description of Artificial Sequence: Synthetic peptide
GPGPG

SEQ ID NO: 74 - RNA, 100 nt, Artificial Sequence
  Description of Artificial Sequence: Synthetic polynucleotide
  See specification as filed for detailed description of substitutions and preferred embodiments
aaaaaaaaaaaaaaaaaaaaaaaaaaaaaaaaaaaaaaaaaaaaaaaaaaaaaaaaaaaaaaaaaaaaaaaaaaaaaaaaaaaaaaaaaaaaaaaaaaaa

SEQ ID NO: 75 - protein, 10 aa, Artificial Sequence
  Description of Artificial Sequence: Synthetic peptide
  MISC_FEATURE (1)..(10): This sequence may encompass 2-10 residues
  See specification as filed for detailed description of substitutions and preferred embodiments
GGGGGGGGGG

SEQ ID NO: 76 - protein, 10 aa, Artificial Sequence
  Description of Artificial Sequence: Synthetic peptide
  MISC_FEATURE (1)..(10): This sequence may encompass 2-10 residues
  See specification as filed for detailed description of substitutions and preferred embodiments
AAAAAAAAAA

SEQ ID NO: 77 - protein, 5 aa, Artificial Sequence
  Description of Artificial Sequence: Synthetic peptide
GPGPG

SEQ ID NO: 78 - RNA, 90 nt, Artificial Sequence
  Description of Artificial Sequence: Synthetic oligonucleotide
  misc_feature (1)..(90): This sequence may encompass 20-90 nucleotides
  See specification as filed for detailed description of substitutions and preferred embodiments
aaaaaaaaaaaaaaaaaaaaaaaaaaaaaaaaaaaaaaaaaaaaaaaaaaaaaaaaaaaaaaaaaaaaaaaaaaaaaaaaaaaaaaaaaa

SEQ ID NO: 79 - RNA, 100 nt, Artificial Sequence; identical to SEQ ID NO: 74
  Description of Artificial Sequence: Synthetic polynucleotide
  See specification as filed for detailed description of substitutions and preferred embodiments

SEQ ID NO: 80 - protein, 8 aa, Artificial Sequence
  Description of Artificial Sequence: Synthetic peptide
SIINFEKL

SEQ ID NO: 81 - protein, 9 aa, Artificial Sequence
  Description of Artificial Sequence: Synthetic peptide
SPSYAYHQF

SEQ ID NO: 82 - protein, 8 aa, Artificial Sequence
  Description of Artificial Sequence: Synthetic peptide
SIINFEKL

SEQ ID NO: 83 - protein, 8 aa, Artificial Sequence
  Description of Artificial Sequence: Synthetic peptide
SIINFEKL

SEQ ID NO: 84 - protein, 8 aa, Artificial Sequence
  Description of Artificial Sequence: Synthetic peptide
SIINFEKL

SEQ ID NO: 85 - protein, 8 aa, Artificial Sequence
  Description of Artificial Sequence: Synthetic peptide
SIINFEKL

SEQ ID NO: 86 - protein, 8 aa, Artificial Sequence
  Description of Artificial Sequence: Synthetic peptide
SIINFEKL

SEQ ID NO: 87 - protein, 8 aa, Artificial Sequence
  Description of Artificial Sequence: Synthetic peptide
SIINFEKL

SEQ ID NO: 88 - protein, 10 aa, Artificial Sequence
  Description of Artificial Sequence: Synthetic peptide
DTIAIAVAGW

SEQ ID NO: 89 - protein, 10 aa, Artificial Sequence
  Description of Artificial Sequence: Synthetic peptide
DTIAVAVAEW

SEQ ID NO: 90 - protein, 9 aa, Artificial Sequence
  Description of Artificial Sequence: Synthetic peptide
AEVVQKVTM

SEQ ID NO: 91 - protein, 9 aa, Artificial Sequence
  Description of Artificial Sequence: Synthetic peptide
AEVVQKVVM

SEQ ID NO: 92 - protein, 9 aa, Artificial Sequence
  Description of Artificial Sequence: Synthetic peptide
TESNDTITL

SEQ ID NO: 93 - protein, 9 aa, Artificial Sequence
  Description of Artificial Sequence: Synthetic peptide
AEDPEREVL

SEQ ID NO: 94 - protein, 10 aa, Artificial Sequence
  Description of Artificial Sequence: Synthetic peptide
YVYVADVAAK

SEQ ID NO: 95 - protein, 9 aa, Artificial Sequence
  Description of Artificial Sequence: Synthetic peptide
NLVPMVATV

SEQ ID NO: 96 - protein, 9 aa, Artificial Sequence
  Description of Artificial Sequence: Synthetic peptide
CLGGLLTMV

SEQ ID NO: 97 - protein, 9 aa, Artificial Sequence
  Description of Artificial Sequence: Synthetic peptide
GILGFVFTL

SEQ ID NO: 98 - protein, 9 aa, Artificial Sequence
  Description of Artificial Sequence: Synthetic peptide
LLFGYPVYV

SEQ ID NO: 99 - protein, 9 aa, Artificial Sequence
  Description of Artificial Sequence: Synthetic peptide
NLVPMVATV

SEQ ID NO: 100 - protein, 9 aa, Artificial Sequence
  Description of Artificial Sequence: Synthetic peptide
CLGGLLTMV

SEQ ID NO: 101 - protein, 9 aa, Artificial Sequence
  Description of Artificial Sequence: Synthetic peptide
GLCTLVAML

SEQ ID NO: 102 - protein, 9 aa, Artificial Sequence
  Description of Artificial Sequence: Synthetic peptide
LLFGYPVYV

SEQ ID NO: 103 - protein, 9 aa, Artificial Sequence
  Description of Artificial Sequence: Synthetic peptide
GILGFVFTL

SEQ ID NO: 104 - protein, 9 aa, Artificial Sequence
  Description of Artificial Sequence: Synthetic peptide
WLSLLVPFV

SEQ ID NO: 105 - protein, 8 aa, Artificial Sequence
  Description of Artificial Sequence: Synthetic peptide
FLLTRICT

SEQ ID NO: 106 - protein, 9 aa, Artificial Sequence
  Description of Artificial Sequence: Synthetic peptide
NLVPMVATV

SEQ ID NO: 107 - protein, 8 aa, Artificial Sequence
  Description of Artificial Sequence: Synthetic peptide
WQAGILAR

SEQ ID NO: 108 - protein, 8 aa, Artificial Sequence
  Description of Artificial Sequence: Synthetic peptide
QGQNLKYQ

SEQ ID NO: 109 - protein, 25 aa, Artificial Sequence
  Description of Artificial Sequence: Synthetic peptide
WQAGILARNLVPMVATVQGQNLKYQ

SEQ ID NO: 110 - protein, 5 aa, Artificial Sequence
  Description of Artificial Sequence: Synthetic peptide
GPGPG

SEQ ID NO: 111 - protein, 5 aa, Artificial Sequence
  Description of Artificial Sequence: Synthetic peptide
GPGPG

SEQ ID NO: 112 - protein, 8 aa, Artificial Sequence
  Description of Artificial Sequence: Synthetic peptide
SINNFEKL

SEQ ID NO: 113 - protein, 8 aa, Artificial Sequence
  Description of Artificial Sequence: Synthetic peptide
SIINFEKL

SEQ ID NO: 114 - protein, 8 aa, Artificial Sequence
  Description of Artificial Sequence: Synthetic peptide
SIINFEKL

SEQ ID NO: 115 - protein, 8 aa, Artificial Sequence
  Description of Artificial Sequence: Synthetic peptide
SIINFEKL

SEQ ID NO: 116 - protein, 8 aa, Artificial Sequence
  Description of Artificial Sequence: Synthetic peptide
SIINFEKL

SEQ ID NO: 117 - protein, 8 aa, Artificial Sequence
  Description of Artificial Sequence: Synthetic peptide
SIINFEKL

SEQ ID NO: 118 - protein, 8 aa, Artificial Sequence
  Description of Artificial Sequence: Synthetic peptide
SIINFEKL

SEQ ID NO: 119 - protein, 8 aa, Artificial Sequence
  Description of Artificial Sequence: Synthetic peptide
SIINFEKL

SEQ ID NO: 120 - protein, 8 aa, Artificial Sequence
  Description of Artificial Sequence: Synthetic peptide
SIINFEKL

SEQ ID NO: 121 - protein, 8 aa, Artificial Sequence
  Description of Artificial Sequence: Synthetic peptide
SIINFEKL

SEQ ID NO: 122 - protein, 8 aa, Artificial Sequence
  Description of Artificial Sequence: Synthetic peptide
SIINFEKL

SEQ ID NO: 123 - protein, 8 aa, Artificial Sequence
  Description of Artificial Sequence: Synthetic peptide
SIINFEKL

SEQ ID NO: 124 - protein, 8 aa, Artificial Sequence
  Description of Artificial Sequence: Synthetic peptide
SIINFEKL

SEQ ID NO: 125 - protein, 8 aa, Artificial Sequence
  Description of Artificial Sequence: Synthetic peptide
SIINFEKL

SEQ ID NO: 126 - protein, 8 aa, Artificial Sequence
  Description of Artificial Sequence: Synthetic peptide
SIINFEKL

SEQ ID NO: 127 - protein, 8 aa, Artificial Sequence
  Description of Artificial Sequence: Synthetic peptide
SIINFEKL

SEQ ID NO: 128 - protein, 8 aa, Artificial Sequence
  Description of Artificial Sequence: Synthetic peptide
SIINFEKL

SEQ ID NO: 129 - DNA, 20 bp, Artificial Sequence
  Description of Artificial Sequence: Synthetic primer
gtggtgtgcagcgagaatag

SEQ ID NO: 130 - DNA, 22 bp, Artificial Sequence
  Description of Artificial Sequence: Synthetic primer
cgctcgttgtagatgtcgttag

SEQ ID NO: 131 - DNA, 15 bp, Artificial Sequence
  Description of Artificial Sequence: Synthetic probe
ttcatgcccgtgttg

SEQ ID NO: 132 - DNA, 22 bp, Artificial Sequence
  Description of Artificial Sequence: Synthetic primer
gtttttgatccagacccagatg

SEQ ID NO: 133 - DNA, 21 bp, Artificial Sequence
  Description of Artificial Sequence: Synthetic primer
gcccattattcagagcgagta

SEQ ID NO: 134 - DNA, 14 bp, Artificial Sequence
  Description of Artificial Sequence: Synthetic probe
tcaccaggatccac

SEQ ID NO: 135 - DNA, 17 bp, Artificial Sequence
  Description of Artificial Sequence: Synthetic primer
ccttgcacatgccggag

SEQ ID NO: 136 - DNA, 17 bp, Artificial Sequence
  Description of Artificial Sequence: Synthetic primer
acagagcctcgcctttg

SEQ ID NO: 137 - DNA, 12 bp, Artificial Sequence
  Description of Artificial Sequence: Synthetic probe
gtgagctggcgg

SEQ ID NO: 138 - DNA, 22 bp, Artificial Sequence
  Description of Artificial Sequence: Synthetic primer
ctgaaagctcggtttgctaatg

SEQ ID NO: 139 - DNA, 21 bp, Artificial Sequence
  Description of Artificial Sequence: Synthetic primer
ccatgctggaagagacaatct

SEQ ID NO: 140 - DNA, 15 bp, Artificial Sequence
  Description of Artificial Sequence: Synthetic probe
tggcgctgaccgata

SEQ ID NO: 141 - DNA, 22 bp, Artificial Sequence
  Description of Artificial Sequence: Synthetic primer
tatgcctatcctgtctcctctg

SEQ ID NO: 142 - DNA, 22 bp, Artificial Sequence
  Description of Artificial Sequence: Synthetic primer
gctaatgcagctaagtcctctc

SEQ ID NO: 143 - DNA, 15 bp, Artificial Sequence
  Description of Artificial Sequence: Synthetic probe
tgaccgtgccttctg

SEQ ID NO: 144 - protein, 8 aa, Artificial Sequence
  Description of Artificial Sequence: Synthetic peptide
SIINFEKL

SEQ ID NO: 145 - protein, 8 aa, Artificial Sequence
  Description of Artificial Sequence: Synthetic peptide
SIINFEKL

SEQ ID NO: 146 - protein, 9 aa, Artificial Sequence
  Description of Artificial Sequence: Synthetic peptide
SPSYAYHQF

SEQ ID NO: 147 - protein, 9 aa, Artificial Sequence
  Description of Artificial Sequence: Synthetic peptide
SPSYVYHQF

SEQ ID NO: 148 - protein, 9 aa, Artificial Sequence
  Description of Artificial Sequence: Synthetic peptide
AEVVQKVTM

SEQ ID NO: 149 - protein, 9 aa, Artificial Sequence
  Description of Artificial Sequence: Synthetic peptide
AEVVQKVVM

SEQ ID NO: 150 - protein, 8 aa, Artificial Sequence
  Description of Artificial Sequence: Synthetic peptide
SIINFEKL

SEQ ID NO: 151 - protein, 5 aa, Artificial Sequence
  Description of Artificial Sequence: Synthetic peptide
GPGPG

SEQ ID NO: 152 - protein, 5 aa, Artificial Sequence
  Description of Artificial Sequence: Synthetic peptide
GPGPG

SEQ ID NO: 153 - protein, 5 aa, Artificial Sequence
  Description of Artificial Sequence: Synthetic peptide
GPGPG

SEQ ID NO: 154 - protein, 5 aa, Artificial Sequence
  Description of Artificial Sequence: Synthetic peptide
GPGPG

SEQ ID NO: 155 - protein, 5 aa, Artificial Sequence
  Description of Artificial Sequence: Synthetic peptide
GPGPG

SEQ ID NO: 156 - protein, 5 aa, Artificial Sequence
  Description of Artificial Sequence: Synthetic peptide
GPGPG

SEQ ID NO: 157 - protein, 5 aa, Artificial Sequence
  Description of Artificial Sequence: Synthetic peptide
GPGPG

SEQ ID NO: 158 - protein, 5 aa, Artificial Sequence
  Description of Artificial Sequence: Synthetic peptide
GPGPG

SEQ ID NO: 159 - protein, 5 aa, Artificial Sequence
  Description of Artificial Sequence: Synthetic peptide
GPGPG

SEQ ID NO: 160 - protein, 5 aa, Artificial Sequence
  Description of Artificial Sequence: Synthetic peptide
GPGPG

SEQ ID NO: 161 - protein, 5 aa, Artificial Sequence
  Description of Artificial Sequence: Synthetic peptide
GPGPG

SEQ ID NO: 162 - protein, 5 aa, Artificial Sequence
  Description of Artificial Sequence: Synthetic peptide
GPGPG

SEQ ID NO: 163 - protein, 5 aa, Artificial Sequence
  Description of Artificial Sequence: Synthetic peptide
GPGPG

SEQ ID NO: 164 - protein, 5 aa, Artificial Sequence
  Description of Artificial Sequence: Synthetic peptide
GPGPG

SEQ ID NO: 165 - protein, 5 aa, Artificial Sequence
  Description of Artificial Sequence: Synthetic peptide
GPGPG

SEQ ID NO: 166 - protein, 5 aa, Artificial Sequence
  Description of Artificial Sequence: Synthetic peptide
GPGPG

SEQ ID NO: 167 - protein, 5 aa, Artificial Sequence
  Description of Artificial Sequence: Synthetic peptide
GPGPG

SEQ ID NO: 168 - RNA, 100 nt, Artificial Sequence; identical to SEQ ID NO: 74
  Description of Artificial Sequence: Synthetic polynucleotide
  See specification as filed for detailed description of substitutions and preferred embodiments

SEQ ID NO: 169 - protein, 10 aa, Artificial Sequence
  Description of Artificial Sequence: Synthetic peptide
  MISC_FEATURE (1)..(10): This sequence may encompass 2-10 residues
  See specification as filed for detailed description of substitutions and preferred embodiments
GGGGGGGGGG

SEQ ID NO: 170 - protein, 10 aa, Artificial Sequence
  Description of Artificial Sequence: Synthetic peptide
  MISC_FEATURE (1)..(10): This sequence may encompass 2-10 residues
  See specification as filed for detailed description of substitutions and preferred embodiments
AAAAAAAAAA

SEQ ID NO: 171 - protein, 5 aa, Artificial Sequence
  Description of Artificial Sequence: Synthetic peptide
GPGPG

SEQ ID NO: 172 - RNA, 90 nt, Artificial Sequence; identical to SEQ ID NO: 78
  Description of Artificial Sequence: Synthetic oligonucleotide
  misc_feature (1)..(90): This sequence may encompass 20-90 nucleotides
  See specification as filed for detailed description of substitutions and preferred embodiments

SEQ ID NO: 173 - RNA, 100 nt, Artificial Sequence; identical to SEQ ID NO: 74
  Description of Artificial Sequence: Synthetic polynucleotide
  See specification as filed for detailed description of substitutions and preferred embodiments

SEQ ID NO: 174 - protein, 9 aa, Artificial Sequence
  Description of Artificial Sequence: Synthetic peptide
GILGFVFTL

SEQ ID NO: 175 - protein, 9 aa, Artificial Sequence
  Description of Artificial Sequence: Synthetic peptide
LLFGYPVYV

SEQ ID NO: 176 - protein, 9 aa, Artificial Sequence
  Description of Artificial Sequence: Synthetic peptide
GLCTLVAML

SEQ ID NO: 177 - protein, 9 aa, Artificial Sequence
  Description of Artificial Sequence: Synthetic peptide
NLVPMVATV

SEQ ID NO: 178 - protein, 9 aa, Artificial Sequence
  Description of Artificial Sequence: Synthetic peptide
CLGGLLTMV

SEQ ID NO: 179 - protein, 9 aa, Artificial Sequence
  Description of Artificial Sequence: Synthetic peptide
NTDNNLAVY

SEQ ID NO: 180 - protein, 9 aa, Artificial Sequence
  Description of Artificial Sequence: Synthetic peptide
EVDPIGHVY

SEQ ID NO: 181 - protein, 9 aa, Artificial Sequence
  Description of Artificial Sequence: Synthetic peptide
LLASSILCA

SEQ ID NO: 182 - protein, 10 aa, Artificial Sequence
  Description of Artificial Sequence: Synthetic peptide
AIFPGAVPAA

SEQ ID NO: 183 - protein, 9 aa, Artificial Sequence
  Description of Artificial Sequence: Synthetic peptide
VYDLSRDIL

SEQ ID NO: 184 - protein, 10 aa, Artificial Sequence
  Description of Artificial Sequence: Synthetic peptide
ASSLPTTMNY

SEQ ID NO: 185 - protein, 13 aa, Artificial Sequence
  Description of Artificial Sequence: Synthetic peptide
PKYVKQNTLKLAT

SEQ ID NO: 186 - protein, 14 aa, Artificial Sequence
  Description of Artificial Sequence: Synthetic peptide
LPLKMLNIPSINVH

SEQ ID NO: 187 - protein, 15 aa, Artificial Sequence
  Description of Artificial Sequence: Synthetic peptide
PEQWMFQGAPPSQGT

SEQ ID NO: 188 - protein, 15 aa, Artificial Sequence
  Description of Artificial Sequence: Synthetic peptide
EHPTFTSQYRIQGKL

SEQ ID NO: 189 - protein, 25 aa, Artificial Sequence
  Description of Artificial Sequence: Synthetic peptide
PILSPLTKGILGFVFTLTVPSERGL

SEQ ID NO: 190 - protein, 25 aa, Artificial Sequence
  Description of Artificial Sequence: Synthetic peptide
HFPGFGQSLLFGYPVYVFGDCVQGD

SEQ ID NO: 191 - protein, 25 aa, Artificial Sequence
  Description of Artificial Sequence: Synthetic peptide
RMQAIQNAGLCTLVAMLEETIFWLQ

SEQ ID NO: 192 - protein, 25 aa, Artificial Sequence
  Description of Artificial Sequence: Synthetic peptide
WQAGILARNLVPMVATVQGQNLKYQ

SEQ ID NO: 193 - protein, 25 aa, Artificial Sequence
  Description of Artificial Sequence: Synthetic peptide
RTYGPVFMCLGGLLTMVAGAVWLTV

SEQ ID NO: 194 - protein, 25 aa, Artificial Sequence
  Description of Artificial Sequence: Synthetic peptide
SSSGLINSNTDNNLAVYDLSRDILN

SEQ ID NO: 195 - protein, 25 aa, Artificial Sequence
  Description of Artificial Sequence: Synthetic peptide
LVFGIELMEVDPIGHVYIFATCLGL

SEQ ID NO: 196 - protein, 25 aa, Artificial Sequence
  Description of Artificial Sequence: Synthetic peptide
MNFYLLLASSILCALIVFWKYRRFQ

SEQ ID NO: 197 - protein, 25 aa, Artificial Sequence
  Description of Artificial Sequence: Synthetic peptide
AAAAAAAALFPGAVPAARPPYPGAV

SEQ ID NO: 198 - protein, 25 aa, Artificial Sequence
  Description of Artificial Sequence: Synthetic peptide
SNTDNNLAVYDLSRDILNNFPHSIA

SEQ ID NO: 199 - protein, 25 aa, Artificial Sequence
  Description of Artificial Sequence: Synthetic peptide
DPPQSPQGASSLPTTMNYPLWSQSY

SEQ ID NO: 200 - protein, 25 aa, Artificial Sequence
  Description of Artificial Sequence: Synthetic peptide
ITYGACPKYVKQNTLKLATGMRNVP

SEQ ID NO: 201 - protein, 25 aa, Artificial Sequence
  Description of Artificial Sequence: Synthetic peptide
SIYVYALPLKMLNIPSINVHHYPSA

SEQ ID NO: 202 - protein, 25 aa, Artificial Sequence
  Description of Artificial Sequence: Synthetic peptide
EGPWVPEQWMFQGAPPSQGTDVVQH

SEQ ID NO: 203 - protein, 25 aa, Artificial Sequence
  Description of Artificial Sequence: Synthetic peptide
RGPQYSEHPTFTSQYRIQGKLEYRH

SEQ ID NO: 204 - protein, 9 aa, Artificial Sequence
  Description of Artificial Sequence: Synthetic peptide
CTPYDINQM

SEQ ID NO: 205 - protein, 8 aa, Artificial Sequence
  Description of Artificial Sequence: Synthetic peptide
TTPESANL

SEQ ID NO: 206 - protein, 9 aa, Artificial Sequence
  Description of Artificial Sequence: Synthetic peptide
CAPPGYALL

SEQ ID NO: 207 - protein, 9 aa, Artificial Sequence
  Description of Artificial Sequence: Synthetic peptide
SGPKTNIIV

SEQ ID NO: 208 - protein, 9 aa, Artificial Sequence
  Description of Artificial Sequence: Synthetic peptide
LSPRTLNAW

SEQ ID NO: 209 - protein, 9 aa, Artificial Sequence
  Description of Artificial Sequence: Synthetic peptide
TVPWPNASL

SEQ ID NO: 210 - protein, 15 aa, Artificial Sequence
  Description of Artificial Sequence: Synthetic peptide
PNGTHSWEYWGAQLN

SEQ ID NO: 211 - protein, 13 aa, Artificial Sequence
  Description of Artificial Sequence: Synthetic peptide
YKYKVVKIEPLGV

SEQ ID NO: 212 - protein, 15 aa, Artificial Sequence
  Description of Artificial Sequence: Synthetic peptide
TEEAKQIVQRHLVVE

SEQ ID NO: 213 - protein, 13 aa, Artificial Sequence
  Description of Artificial Sequence: Synthetic peptide
AGSLQGQWRGAAG

SEQ ID NO: 214 - protein, 16 aa, Artificial Sequence
  Description of Artificial Sequence: Synthetic peptide
EISTNIRQAGVQYSRA

SEQ ID NO: 215 - protein, 9 aa, Artificial Sequence
  Description of Artificial Sequence: Synthetic peptide
RPKQAWCWF

SEQ ID NO: 216 - protein, 9 aa, Artificial Sequence
  Description of Artificial Sequence: Synthetic peptide
RPKVPLRTM

SEQ ID NO: 217 - protein, 9 aa, Artificial Sequence
  Description of Artificial Sequence: Synthetic peptide
GPRKPIKCW

SEQ ID NO: 218 - protein, 9 aa, Artificial Sequence
  Description of Artificial Sequence: Synthetic peptide
LNMADKKET

SEQ ID NO: 219 - protein, 25 aa, Artificial Sequence
  Description of Artificial Sequence: Synthetic peptide
MFQALSEGCTPYDINQMLNVLGDHQ

SEQ ID NO: 220 - protein, 25 aa, Artificial Sequence
  Description of Artificial Sequence: Synthetic peptide
SCISEADATTPESANLGEEILSQLY

SEQ ID NO: 221 - protein, 25 aa, Artificial Sequence
  Description of Artificial Sequence: Synthetic peptide
WDAIRFRYCAPPGYALLRCNDTNYS

SEQ ID NO: 222 - protein, 25 aa, Artificial Sequence
  Description of Artificial Sequence: Synthetic peptide
AFLMALTDSGPKTNIIVDSQYVMGI

SEQ ID NO: 223 - protein, 25 aa, Artificial Sequence
  Description of Artificial Sequence: Synthetic peptide
GNVWVHTPLSPRTLNAWVKAVEEKK

SEQ ID NO: 224 - protein, 25 aa, Artificial Sequence
  Description of Artificial Sequence: Synthetic peptide
AFRQVCHTTVPWPNASLTPKWNNET

SEQ ID NO: 225 - protein, 25 aa, Artificial Sequence
  Description of Artificial Sequence: Synthetic peptide
VFNFPPNGTHSWEYWGAQLNAMKGD

SEQ ID NO: 226 - protein, 25 aa, Artificial Sequence
  Description of Artificial Sequence: Synthetic peptide
NWRSELYKYKVVKIEPLGVAPTKAK

SEQ ID NO: 227 - protein, 25 aa, Artificial Sequence
  Description of Artificial Sequence: Synthetic peptide
EKVKHTEEAKQIVQRHLVVETGTTE

SEQ ID NO: 228 - protein, 25 aa, Artificial Sequence
  Description of Artificial Sequence: Synthetic peptide
DQVESTAGSLQGQWRGAAGTAAQAA

SEQ ID NO: 229 - protein, 25 aa, Artificial Sequence
  Description of Artificial Sequence: Synthetic peptide
QELDEISTNIRQAGVQYSRADEEQQ

SEQ ID NO: 230 - protein, 25 aa, Artificial Sequence
  Description of Artificial Sequence: Synthetic peptide
FHSQPINERPKQAWCWFGGSWKEAI

SEQ ID NO: 231 - protein, 25 aa, Artificial Sequence
  Description of Artificial Sequence: Synthetic peptide
DDIDEEDDDLVGVSVRPKVPLRTMS

SEQ ID NO: 232 - protein, 25 aa, Artificial Sequence
  Description of Artificial Sequence: Synthetic peptide
PFAAAQQRGPRKPIKCWNCGKEGHS

SEQ ID NO: 233 - protein, 25 aa, Artificial Sequence
  Description of Artificial Sequence: Synthetic peptide
RRLTARGLLNMADKKETRTPKKAKA

SEQ ID NO: 234 - protein, 8 aa, Artificial Sequence
  Description of Artificial Sequence: Synthetic peptide
SIINFEKL

SEQ ID NO: 235 - protein, 9 aa, Artificial Sequence
  Description of Artificial Sequence: Synthetic peptide
EGPRNQDWL

SEQ ID NO: 236 - protein, 9 aa, Artificial Sequence
  Description of Artificial Sequence: Synthetic peptide
TAPDNLGYM

SEQ ID NO: 237 - protein, 9 aa, Artificial Sequence
  Description of Artificial Sequence: Synthetic peptide
SVYDFFVWL

SEQ ID NO: 238 - protein, 9 aa, Artificial Sequence
  Description of Artificial Sequence: Synthetic peptide
SPSYAYHQF

SEQ ID NO: 239 - protein, 9 aa, Artificial Sequence
  Description of Artificial Sequence: Synthetic peptide
MNKYAYHML

SEQ ID NO: 240 - protein, 8 aa, Artificial Sequence
  Description of Artificial Sequence: Synthetic peptide
SIIVFNLL

SEQ ID NO: 241 - protein, 9 aa, Artificial Sequence
  Description of Artificial Sequence: Synthetic peptide
ASMTNMELM

SEQ ID NO: 242 - protein, 9 aa, Artificial Sequence
  Description of Artificial Sequence: Synthetic peptide
AQLANDVVL

SEQ ID NO: 243 - protein, 9 aa, Artificial Sequence
  Description of Artificial Sequence: Synthetic peptide
LPYLGWLVF

SEQ ID NO: 244 - protein, 10 aa, Artificial Sequence
  Description of Artificial Sequence: Synthetic peptide
GYCGLRGTGV

SEQ ID NO: 245 - protein, 8 aa, Artificial Sequence
  Description of Artificial Sequence: Synthetic peptide
LSIFKHKL

SEQ ID NO: 246 - protein, 8 aa, Artificial Sequence
  Description of Artificial Sequence: Synthetic peptide
LIWIPALL

SEQ ID NO: 247 - protein, 9 aa, Artificial Sequence
  Description of Artificial Sequence: Synthetic peptide
SSGHNECPV

SEQ ID NO: 248 - protein, 9 aa, Artificial Sequence
  Description of Artificial Sequence: Synthetic peptide
GQKMNAQAI

SEQ ID NO: 249 - protein, 17 aa, Artificial Sequence
  Description of Artificial Sequence: Synthetic peptide
ISQAVHAAHAEINEAGR

SEQ ID NO: 250 - protein, 19 aa, Artificial Sequence
  Description of Artificial Sequence: Synthetic peptide
MTEQQWNFAGIEAAASAIQ

SEQ ID NO: 251 - protein, 20 aa, Artificial Sequence
  Description of Artificial Sequence: Synthetic peptide
FNNFTVSFWLRVPKVSASHL

SEQ ID NO: 252 - protein, 15 aa, Artificial Sequence
  Description of Artificial Sequence: Synthetic peptide
DGSTDYGILQINSRW

SEQ ID NO: 253 - protein, 19 aa, Artificial Sequence
  Description of Artificial Sequence: Synthetic peptide
MEVGWYRSPFSRVVHLYRN

SEQ ID NO: 254 - protein, 25 aa, Artificial Sequence
  Description of Artificial Sequence: Synthetic peptide
VSGLEQLESIINFEKLTEWTSSNVM

SEQ ID NO: 255 - protein, 25 aa, Artificial Sequence
  Description of Artificial Sequence: Synthetic peptide
ALLAVGALEGPRNQDWLGVPRQLVT

SEQ ID NO: 256 - protein, 25 aa, Artificial Sequence
  Description of Artificial Sequence: Synthetic peptide
VTNTEMFVTAPDNLGYMYEVQWPGQ

SEQ ID NO: 257 - protein, 25 aa, Artificial Sequence
  Description of Artificial Sequence: Synthetic peptide
TQPQIANCSVYDFFVWLHYYSVRDT

SEQ ID NO: 258 - protein, 25 aa, Artificial Sequence
  Description of Artificial Sequence: Synthetic peptide
LWPRVTYHSPSYAYHQFERRAKYKR

SEQ ID NO: 259 - protein, 25 aa, Artificial Sequence
  Description of Artificial Sequence: Synthetic peptide
LWPRVTYHMNKYAYHMLERRAKYKR

SEQ ID NO: 260 - protein, 25 aa, Artificial Sequence
  Description of Artificial Sequence: Synthetic peptide
GQSLVISASIIVFNLLELEGDYRDD

SEQ ID NO: 261 - protein, 25 aa, Artificial Sequence
  Description of Artificial Sequence: Synthetic peptide
GIPVHLELASMTNMELMSSIVHQQV

SEQ ID NO: 262 - protein, 25 aa, Artificial Sequence
  Description of Artificial Sequence: Synthetic peptide
RVLELFRAAQLANDVVLQIMELCGA

SEQ ID NO: 263 - protein, 25 aa, Artificial Sequence
  Description of Artificial Sequence: Synthetic peptide
HRYSLEEILPYLGWLVFAVVTTSFL

SEQ ID NO: 264 - protein, 25 aa, Artificial Sequence
  Description of Artificial Sequence: Synthetic peptide
YLSKNPDGYCGLRGTGVSCPMAIKK

SEQ ID NO: 265 - protein, 25 aa, Artificial Sequence
  Description of Artificial Sequence: Synthetic peptide
NEIPFTYEQLSIFKHKLDKTYPQGY

SEQ ID NO: 266 - protein, 25 aa, Artificial Sequence
  Description of Artificial Sequence: Synthetic peptide
SRASLLGPGFVLIWIPALLPALRLS

SEQ ID NO: 267 - protein, 25 aa, Artificial Sequence
  Description of Artificial Sequence: Synthetic peptide
NWHKGWNWSSGHNECPVGASCHPFT

SEQ ID NO: 268 - protein, 25 aa, Artificial Sequence
  Description of Artificial Sequence: Synthetic peptide
KTLLKVSKGQKMNAQAIALVACYLR

SEQ ID NO: 269 - protein, 25 aa, Artificial Sequence
  Description of Artificial Sequence: Synthetic peptide
ESLKISQAVHAAHAEINEAGREVVG

SEQ ID NO: 270 - protein, 25 aa, Artificial Sequence
  Description of Artificial Sequence: Synthetic peptide
MTEQQWNFAGIEAAASAIQGNVTSI

SEQ ID NO: 271 - protein, 25 aa, Artificial Sequence
  Description of Artificial Sequence: Synthetic peptide
DMFNNFTVSFWLRVPKVSASHLEQY

SEQ ID NO: 272 - protein, 25 aa, Artificial Sequence
  Description of Artificial Sequence: Synthetic peptide
TNRNTDGSTDYGILQINSRWWCNDG

SEQ ID NO: 273 - protein, 25 aa, Artificial Sequence
  Description of Artificial Sequence: Synthetic peptide
TGMEVGWYRSPFSRVVHLYRNGKDQ

SEQ ID NO: 274 - protein, 9 aa, Artificial Sequence
  Description of Artificial Sequence: Synthetic peptide
NLVPMVATV

SEQ ID NO: 275 - protein, 9 aa, Artificial Sequence
  Description of Artificial Sequence: Synthetic peptide
CLGGLLTMV

SEQ ID NO: 276 - protein, 9 aa, Artificial Sequence
  Description of Artificial Sequence: Synthetic peptide
GLCTLVAML

SEQ ID NO: 277 - protein, 9 aa, Artificial Sequence
  Description of Artificial Sequence: Synthetic peptide
LLFGYPVYV

SEQ ID NO: 278 - protein, 9 aa, Artificial Sequence
  Description of Artificial Sequence: Synthetic peptide
GILGFVFTL

SEQ ID NO: 279 - protein, 13 aa, Artificial Sequence
  Description of Artificial Sequence: Synthetic peptide
AKFVAAWTLKAAA

SEQ ID NO: 280 - protein, 14 aa, Artificial Sequence
  Description of Artificial Sequence: Synthetic peptide
QYIKANSKFIGITE

SEQ ID NO: 281 - protein, 9 aa, Artificial Sequence
  Description of Artificial Sequence: Synthetic peptide
NLVPMVATV

SEQ ID NO: 282 - protein, 9 aa, Artificial Sequence
  Description of Artificial Sequence: Synthetic peptide
CLGGLLTMV

SEQ ID NO: 283 - protein, 9 aa, Artificial Sequence
  Description of Artificial Sequence: Synthetic peptide
GLCTLVAML

SEQ ID NO: 284 - protein, 9 aa, Artificial Sequence
  Description of Artificial Sequence: Synthetic peptide
LLFGYPVYV

SEQ ID NO: 285 - protein, 9 aa, Artificial Sequence
  Description of Artificial Sequence: Synthetic peptide
GILGFVFTL

SEQ ID NO: 286 - protein, 9 aa, Artificial Sequence
  Description of Artificial Sequence: Synthetic peptide
DLMGYIPAV

SEQ ID NO: 287 - protein, 10 aa, Artificial Sequence
  Description of Artificial Sequence: Synthetic peptide
FLPSDFFPSV

SEQ ID NO: 288 - protein, 9 aa, Artificial Sequence
  Description of Artificial Sequence: Synthetic peptide
FLLTRILTI

SEQ ID NO: 289 - protein, 9 aa, Artificial Sequence
  Description of Artificial Sequence: Synthetic peptide
WLSLLVPFV

SEQ ID NO: 290 - protein, 9 aa, Artificial Sequence
  Description of Artificial Sequence: Synthetic peptide
FLLSLGIHL

SEQ ID NO: 291 - protein, 9 aa, Artificial Sequence
  Description of Artificial Sequence: Synthetic peptide
ILKEPVHGV

SEQ ID NO: 292 - protein, 10 aa, Artificial Sequence
  Description of Artificial Sequence: Synthetic peptide
YMLDLQPETT

SEQ ID NO: 293 - protein, 9 aa, Artificial Sequence
  Description of Artificial Sequence: Synthetic peptide
CINGVCWTV

SEQ ID NO: 294 - protein, 10 aa, Artificial Sequence
  Description of Artificial Sequence: Synthetic peptide
YLLPRRGPRL

SEQ ID NO: 295 - protein, 9 aa, Artificial Sequence
  Description of Artificial Sequence: Synthetic peptide
FLYALALLL

SEQ ID NO: 296 - protein, 9 aa, Artificial Sequence
  Description of Artificial Sequence: Synthetic peptide
AAGIGILTV

SEQ ID NO: 297 - protein, 9 aa, Artificial Sequence
  Description of Artificial Sequence: Synthetic peptide
SLLMWITQV

SEQ ID NO: 298 - protein, 9 aa, Artificial Sequence
  Description of Artificial Sequence: Synthetic peptide
KLGGALQAK

SEQ ID NO: 299 - protein, 9 aa, Artificial Sequence
  Description of Artificial Sequence: Synthetic peptide
RLRAEAQVK

SEQ ID NO: 300 - protein, 10 aa, Artificial Sequence
  Description of Artificial Sequence: Synthetic peptide
EENLLDFVRF

SEQ ID NO: 301 - protein, 9 aa, Artificial Sequence
  Description of Artificial Sequence: Synthetic peptide
EEYLQAFTY

SEQ ID NO: 302 - protein, 9 aa, Artificial Sequence
  Description of Artificial Sequence: Synthetic peptide
CTPYDINQM

SEQ ID NO: 303 - protein, 8 aa, Artificial Sequence
  Description of Artificial Sequence: Synthetic peptide
TTPESANL

SEQ ID NO: 304 - protein, 8 aa, Artificial Sequence
  Description of Artificial Sequence: Synthetic peptide
CAPPGALL

SEQ ID NO: 305 - protein, 9 aa, Artificial Sequence
  Description of Artificial Sequence: Synthetic peptide
SGPKTNIIV

SEQ ID NO: 306 - protein, 9 aa, Artificial Sequence
  Description of Artificial Sequence: Synthetic peptide
LSPRTLNAW

SEQ ID NO: 307 - protein, 9 aa, Artificial Sequence
  Description of Artificial Sequence: Synthetic peptide
TVPWPNASL

SEQ ID NO: 308 - protein, 8 aa, Artificial Sequence
  Description of Artificial Sequence: Synthetic peptide
SIINFEKL

SEQ ID NO: 309 - protein, 9 aa, Artificial Sequence
  Description of Artificial Sequence: Synthetic peptide
SPSYAYHQF

SEQ ID NO: 310 - protein, 9 aa, Artificial Sequence
  Description of Artificial Sequence: Synthetic peptide
EGPRNQDWL

SEQ ID NO: 311 - protein, 9 aa, Artificial Sequence
  Description of Artificial Sequence: Synthetic peptide
DWENVSPEL

SEQ ID NO: 312 - protein, 8 aa, Artificial Sequence
  Description of Artificial Sequence: Synthetic peptide
SIIVFNLL

SEQ ID NO: 313 - protein, 9 aa, Artificial Sequence
  Description of Artificial Sequence: Synthetic peptide
ASMTNMELM

SEQ ID NO: 314 - protein, 9 aa, Artificial Sequence
  Description of Artificial Sequence: Synthetic peptide
AQLANDVVL

SEQ ID NO: 315 - protein, 9 aa, Artificial Sequence
  Description of Artificial Sequence: Synthetic peptide
SVYDFFVWL

SEQ ID NO: 316 - protein, 9 aa, Artificial Sequence
  Description of Artificial Sequence: Synthetic peptide
MNKYAYHML

SEQ ID NO: 317 - protein, 9 aa, Artificial Sequence
  Description of Artificial Sequence: Synthetic peptide
GILGFVFTL

SEQ ID NO: 318 - protein, 9 aa, Artificial Sequence
  Description of Artificial Sequence: Synthetic peptide
LLFGYPVYV

SEQ ID NO: 319 - protein, 9 aa, Artificial Sequence
  Description of Artificial Sequence: Synthetic peptide
GLCTLVAML

SEQ ID NO: 320 - protein, 9 aa, Artificial Sequence
  Description of Artificial Sequence: Synthetic peptide
NLVPMVATV

SEQ ID NO: 321 - protein, 9 aa, Artificial Sequence
  Description of Artificial Sequence: Synthetic peptide
CLGGLLTMV

SEQ ID NO: 322 - protein, 13 aa, Artificial Sequence
  Description of Artificial Sequence: Synthetic peptide
AKFVAAWTLKAAA

SEQ ID NO: 323 - protein, 15 aa, Artificial Sequence
  Description of Artificial Sequence: Synthetic peptide
QYIKANSKFIGITEL

SEQ ID NO: 324 - protein, 10 aa, Artificial Sequence
  Description of Artificial Sequence: Synthetic peptide
YVYVADVAAK

SEQ ID NO: 325 - protein, 9 aa, Artificial Sequence
  Description of Artificial Sequence: Synthetic peptide
TTNQKTELY

SEQ ID NO: 326 - protein, 9 aa, Artificial Sequence
  Description of Artificial Sequence: Synthetic peptide
GTEELRSLY

SEQ ID NO: 327 - protein, 8 aa, Artificial Sequence
  Description of Artificial Sequence: Synthetic peptide
VLDVGDAY

SEQ ID NO: 328 - protein, 10 aa, Artificial Sequence
  Description of Artificial Sequence: Synthetic peptide
VTVLDVGDAY

SEQ ID NO: 329 - protein, 9 aa, Artificial Sequence
  Description of Artificial Sequence: Synthetic peptide
QLAEVVQKV

SEQ ID NO: 330 - protein, 9 aa, Artificial Sequence
  Description of Artificial Sequence: Synthetic peptide
VLAEAMSQV

SEQ ID NO: 331 - protein, 9 aa, Artificial Sequence
  Description of Artificial Sequence: Synthetic peptide
SLYNTVATL

SEQ ID NO: 332 - protein, 9 aa, Artificial Sequence
  Description of Artificial Sequence: Synthetic peptide
VLAEAMSQA

SEQ ID NO: 333 - protein, 9 aa, Artificial Sequence
  Description of Artificial Sequence: Synthetic peptide
ILKEPVHGV

SEQ ID NO: 334 - protein, 9 aa, Artificial Sequence
  Description of Artificial Sequence: Synthetic peptide
SLFNTVATL

SEQ ID NO: 335 - protein, 9 aa, Artificial Sequence
  Description of Artificial Sequence: Synthetic peptide
SLLETTEGC

SEQ ID NO: 336 - protein, 9 aa, Artificial Sequence
  Description of Artificial Sequence: Synthetic peptide
AVLSVINRV

SEQ ID NO: 337 - protein, 9 aa, Artificial Sequence
  Description of Artificial Sequence: Synthetic peptide
SLVDTIAIV

SEQ ID NO: 338 - protein, 9 aa, Artificial Sequence
  Description of Artificial Sequence: Synthetic peptide
SLAEGKVMI

SEQ ID NO: 339 - protein, 9 aa, Artificial Sequence
  Description of Artificial Sequence: Synthetic peptide
GLCKNVSTV

SEQ ID NO: 340 - protein, 11 aa, Artificial Sequence
  Description of Artificial Sequence: Synthetic peptide
VMLNIVGGHQA

SEQ ID NO: 341 - protein, 10 aa, Artificial Sequence
  Description of Artificial Sequence: Synthetic peptide
TLWQRPLVTV

SEQ ID NO: 342 - protein, 9 aa, Artificial Sequence
  Description of Artificial Sequence: Synthetic peptide
GLLETTEGC

SEQ ID NO: 343 - protein, 10 aa, Artificial Sequence
  Description of Artificial Sequence: Synthetic peptide
KIIEQLQPSV

SEQ ID NO: 344 - protein, 10 aa, Artificial Sequence
  Description of Artificial Sequence: Synthetic peptide
KLVPVDPDEV

SEQ ID NO: 345 - protein, 10 aa, Artificial Sequence
  Description of Artificial Sequence: Synthetic peptide
TLWQRPIVTV

SEQ ID NO: 346 - protein, 9 aa, Artificial Sequence
  Description of Artificial Sequence: Synthetic peptide
YDLGDINNL

SEQ ID NO: 347 - protein, 9 aa, Artificial Sequence
  Description of Artificial Sequence: Synthetic peptide
LLDTIAIAV

SEQ ID NO: 348 - protein, 9 aa, Artificial Sequence
  Description of Artificial Sequence: Synthetic peptide
AVLSIISRV

SEQ ID NO: 349 - protein, 9 aa, Artificial Sequence
  Description of Artificial Sequence: Synthetic peptide
YDLGNDINL

SEQ ID NO: 350 - protein, 9 aa, Artificial Sequence
  Description of Artificial Sequence: Synthetic peptide
AVLSIINRV

SEQ ID NO: 351 - protein, 9 aa, Artificial Sequence
  Description of Artificial Sequence: Synthetic peptide
TLNNNTIEM

SEQ ID NO: 352 - protein, 9 aa, Artificial Sequence
  Description of Artificial Sequence: Synthetic peptide
IVTDSQYAL

SEQ ID NO: 353 - protein, 10 aa, Artificial Sequence
  Description of Artificial Sequence: Synthetic peptide
KLVPVDPEEV

SEQ ID NO: 354 - protein, 9 aa, Artificial Sequence
  Description of Artificial Sequence: Synthetic peptide
VLAEAMSQV

SEQ ID NO: 355 - protein, 9 aa, Artificial Sequence
  Description of Artificial Sequence: Synthetic peptide
QLAEVVQKV

SEQ ID NO: 356 - protein, 9 aa, Artificial Sequence
  Description of Artificial Sequence: Synthetic peptide
ILKEPVHGV

SEQ ID NO: 357 - protein, 9 aa, Artificial Sequence
  Description of Artificial Sequence: Synthetic peptide
VLAEAMSQA

SEQ ID NO: 358 - protein, 9 aa, Artificial Sequence
  Description of Artificial Sequence: Synthetic peptide
SLYNTVATL

SEQ ID NO: 359 - protein, 9 aa, Artificial Sequence
  Description of Artificial Sequence: Synthetic peptide
ILKDPVHGA

SEQ ID NO: 360 - protein, 9 aa, Artificial Sequence
  Description of Artificial Sequence: Synthetic peptide
VVKIEPLGV

SEQ ID NO: 361 - protein, 9 aa, Artificial Sequence
  Description of Artificial Sequence: Synthetic peptide
SLFNTVATL

SEQ ID NO: 362 - protein, 9 aa, Artificial Sequence
  Description of Artificial Sequence: Synthetic peptide
ALRQVVEQL

SEQ ID NO: 363 - protein, 9 aa, Artificial Sequence
  Description of Artificial Sequence: Synthetic peptide
ALRTGTEEL

SEQ ID NO: 364 - protein, 9 aa, Artificial Sequence
  Description of Artificial Sequence: Synthetic peptide
SISERVLSA

SEQ ID NO: 365 - protein, 10 aa, Artificial Sequence
  Description of Artificial Sequence: Synthetic peptide
TLWQRPLVTV

SEQ ID NO: 366 - protein, 10 aa, Artificial Sequence
  Description of Artificial Sequence: Synthetic peptide
YLKDQQLLGI

SEQ ID NO: 367 - protein, 10 aa, Artificial Sequence
  Description of Artificial Sequence: Synthetic peptide
YLRDQQLLGI

SEQ ID NO: 368 - protein, 10 aa, Artificial Sequence
  Description of Artificial Sequence: Synthetic peptide
TLWQRPIVTV

SEQ ID NO: 369 - protein, 9 aa, Artificial Sequence
  Description of Artificial Sequence: Synthetic peptide
GLCKNVSTV

SEQ ID NO: 370 - protein, 9 aa, Artificial Sequence
  Description of Artificial Sequence: Synthetic peptide
KIKPPLPSV

SEQ ID NO: 371 - protein, 9 aa, Artificial Sequence
  Description of Artificial Sequence: Synthetic peptide
NLKKVVVQL

SEQ ID NO: 372 - protein, 9 aa, Artificial Sequence
  Description of Artificial Sequence: Synthetic peptide
RIKPPLPSV

SEQ ID NO: 373 - protein, 9 aa, Artificial Sequence
  Description of Artificial Sequence: Synthetic peptide
VVKLEPLGV

SEQ ID NO: 374 - protein, 10 aa, Artificial Sequence
  Description of Artificial Sequence: Synthetic peptide
AMYAPPIQGV

SEQ ID NO: 375 - protein, 9 aa, Artificial Sequence
  Description of Artificial Sequence: Synthetic peptide
RVIEIVQGI

SEQ ID NO: 376 - protein, 9 aa, Artificial Sequence
  Description of Artificial Sequence: Synthetic peptide
SLFYKLDVV

SEQ ID NO: 377 - protein, 9 aa, Artificial Sequence
  Description of Artificial Sequence: Synthetic peptide
SLAENRTMI

SEQ ID NO: 378 - protein, 9 aa, Artificial Sequence
  Description of Artificial Sequence: Synthetic peptide
AVLSIISRV

SEQ ID NO: 379 - protein, 9 aa, Artificial Sequence
  Description of Artificial Sequence: Synthetic peptide
ELKSLFNTV

SEQ ID NO: 380 - protein, 9 aa, Artificial Sequence
  Description of Artificial Sequence: Synthetic peptide
LLSIVTRTV

SEQ ID NO: 381 - protein, 9 aa, Artificial Sequence
  Description of Artificial Sequence: Synthetic peptide
SLVDTIAIV

SEQ ID NO: 382 - protein, 8 aa, Artificial Sequence
  Description of Artificial Sequence: Synthetic peptide
VLSIISRV

SEQ ID NO: 383 - protein, 9 aa, Artificial Sequence
  Description of Artificial Sequence: Synthetic peptide
QLQARVLAV

SEQ ID NO: 384 - protein, 9 aa, Artificial Sequence
  Description of Artificial Sequence: Synthetic peptide
GAASITLTV

SEQ ID NO: 385 - protein, 9 aa, Artificial Sequence
  Description of Artificial Sequence: Synthetic peptide
RVIETVQRL

SEQ ID NO: 386 - protein, 8 aa, Artificial Sequence
  Description of Artificial Sequence: Synthetic peptide
VLSVINRV

SEQ ID NO: 387 - protein, 9 aa, Artificial Sequence
  Description of Artificial Sequence: Synthetic peptide
ALNPGLLET

SEQ ID NO: 388 - protein, 11 aa, Artificial Sequence
  Description of Artificial Sequence: Synthetic peptide
FLKEKGGLDGL

SEQ ID NO: 389 - protein, 10 aa, Artificial Sequence
  Description of Artificial Sequence: Synthetic peptide
LTRDGGITSA

SEQ ID NO: 390 - protein, 9 aa, Artificial Sequence
  Description of Artificial Sequence: Synthetic peptide
SLFYRLDVV

SEQ ID NO: 391 - protein, 9 aa, Artificial Sequence
  Description of Artificial Sequence: Synthetic peptide
SLAEGKVMI

SEQ ID NO: 392 - protein, 9 aa, Artificial Sequence
  Description of Artificial Sequence: Synthetic peptide
NVKTIIVQL

SEQ ID NO: 393 - protein, 9 aa, Artificial Sequence
  Description of Artificial Sequence: Synthetic peptide
AVLSVINRV

SEQ ID NO: 394 - protein, 9 aa, Artificial Sequence
  Description of Artificial Sequence: Synthetic peptide
NVKNIIVQL

SEQ ID NO: 395 - protein, 9 aa, Artificial Sequence
  Description of Artificial Sequence: Synthetic peptide
SLFYRLDIV

SEQ ID NO: 396 - protein, 9 aa, Artificial Sequence
  Description of Artificial Sequence: Synthetic peptide
NQKTELHAV

SEQ ID NO: 397 - protein, 9 aa, Artificial Sequence
  Description of Artificial Sequence: Synthetic peptide
ELKKIIGQV

SEQ ID NO: 398 - protein, 9 aa, Artificial Sequence
  Description of Artificial Sequence: Synthetic peptide
AVLSIINRV

SEQ ID NO: 399 - protein, 8 aa, Artificial Sequence
  Description of Artificial Sequence: Synthetic peptide
VLSIINRV

SEQ ID NO: 400 - protein, 10 aa, Artificial Sequence
  Description of Artificial Sequence: Synthetic peptide
KVVKIEPLGV

SEQ ID NO: 401 - protein, 9 aa, Artificial Sequence
  Description of Artificial Sequence: Synthetic peptide
TLSERVLST

SEQ ID NO: 402 - protein, 10 aa, Artificial Sequence
  Description of Artificial Sequence: Synthetic peptide
GLIGLRIVFA

SEQ ID NO: 403 - protein, 9 aa, Artificial Sequence
  Description of Artificial Sequence: Synthetic peptide
SLSPRTLNA

SEQ ID NO: 404 - protein, 9 aa, Artificial Sequence
  Description of Artificial Sequence: Synthetic peptide
QLAEVVQKV

SEQ ID NO: 405 - protein, 9 aa, Artificial Sequence
  Description of Artificial Sequence: Synthetic peptide
AVLSVINRV

SEQ ID NO: 406 - protein, 9 aa, Artificial Sequence
  Description of Artificial Sequence: Synthetic peptide
AVLSIINRV

SEQ ID NO: 407 - protein, 9 aa, Artificial Sequence
  Description of Artificial Sequence: Synthetic peptide
SLFNTVATL

SEQ ID NO: 408 - protein, 9 aa, Artificial Sequence
  Description of Artificial Sequence: Synthetic peptide
SLYNTVATL

SEQ ID NO: 409 - protein, 9 aa, Artificial Sequence
  Description of Artificial Sequence: Synthetic peptide
RVIETVQRL

SEQ ID NO: 410 - protein, 9 aa, Artificial Sequence
  Description of Artificial Sequence: Synthetic peptide
AVLSIISRV

SEQ ID NO: 411 - protein, 9 aa, Artificial Sequence
  Description of Artificial Sequence: Synthetic peptide
ILKEPVHGV

SEQ ID NO: 412 - protein, 9 aa, Artificial Sequence
  Description of Artificial Sequence: Synthetic peptide
LLLYWGREL

SEQ ID NO: 413 - protein, 9 aa, Artificial Sequence
  Description of Artificial Sequence: Synthetic peptide
TLHQVVEQL

SEQ ID NO: 414 - protein, 10 aa, Artificial Sequence
  Description of Artificial Sequence: Synthetic peptide
TLWQRPLVTV

SEQ ID NO: 415 - protein, 9 aa, Artificial Sequence
  Description of Artificial Sequence: Synthetic peptide
SLVDTIAIV

SEQ ID NO: 416 - protein, 9 aa, Artificial Sequence
  Description of Artificial Sequence: Synthetic peptide
ILALVVWTI

SEQ ID NO: 417 - protein, 9 aa, Artificial Sequence
  Description of Artificial Sequence: Synthetic peptide
ALRQVVEQL

SEQ ID NO: 418 - protein, 10 aa, Artificial Sequence
  Description of Artificial Sequence: Synthetic peptide
TLWQRPIVTV

SEQ ID NO: 419 - protein, 9 aa, Artificial Sequence
  Description of Artificial Sequence: Synthetic peptide
TLNAWVKVI

SEQ ID NO: 420 - protein, 11 aa, Artificial Sequence
  Description of Artificial Sequence: Synthetic peptide
SLFYRLDIVQL

SEQ ID NO: 421 - protein, 9 aa, Artificial Sequence
  Description of Artificial Sequence: Synthetic peptide
LLVYWSQEL

SEQ ID NO: 422 - protein, 9 aa, Artificial Sequence
  Description of Artificial Sequence: Synthetic peptide
LVSQIIEKL

SEQ ID NO: 423 - protein, 9 aa, Artificial Sequence
  Description of Artificial Sequence: Synthetic peptide
NLKKVVVQL

SEQ ID NO: 424 - protein, 9 aa, Artificial Sequence
  Description of Artificial Sequence: Synthetic peptide
SLFYKLDVV

SEQ ID NO: 425 - protein, 9 aa, Artificial Sequence
  Description of Artificial Sequence: Synthetic peptide
YDLGDINNL

SEQ ID NO: 426 - protein, 10 aa, Artificial Sequence
  Description of Artificial Sequence: Synthetic peptide
NLLDTIAIAV

SEQ ID NO: 427 - protein, 9 aa, Artificial Sequence
  Description of Artificial Sequence: Synthetic peptide
LVNQIIEKL

SEQ ID NO: 428 - protein, 9 aa, Artificial Sequence
  Description of Artificial Sequence: Synthetic peptide
RVIEIVQGI

SEQ ID NO: 429 - protein, 9 aa, Artificial Sequence
  Description of Artificial Sequence: Synthetic peptide
KVYSLFYKL

SEQ ID NO: 430 - protein, 9 aa, Artificial Sequence
  Description of Artificial Sequence: Synthetic peptide
DISKWLWYI

SEQ ID NO: 431 - protein, 9 aa, Artificial Sequence
  Description of Artificial Sequence: Synthetic peptide
LLVYWSREL

SEQ ID NO: 432 - protein, 9 aa, Artificial Sequence
  Description of Artificial Sequence: Synthetic peptide
KIKPPLPSV

SEQ ID NO: 433 - protein, 9 aa, Artificial Sequence
  Description of Artificial Sequence: Synthetic peptide
NVKNIIVQL

SEQ ID NO: 434 - protein, 9 aa, Artificial Sequence
  Description of Artificial Sequence: Synthetic peptide
AIVGLIVAL

SEQ ID NO: 435 - protein, 10 aa, Artificial Sequence
  Description of Artificial Sequence: Synthetic peptide
NLYDTIAIAV

SEQ ID NO: 436 - protein, 9 aa, Artificial Sequence
  Description of Artificial Sequence: Synthetic peptide
RIKPPLPSV

SEQ ID NO: 437 - protein, 10 aa, Artificial Sequence
  Description of Artificial Sequence: Synthetic peptide
KLIEKDKVYL

SEQ ID NO: 438 - protein, 9 aa, Artificial Sequence
  Description of Artificial Sequence: Synthetic peptide
KVYSLFYRL

SEQ ID NO: 439 - protein, 9 aa, Artificial Sequence
  Description of Artificial Sequence: Synthetic peptide
SLFYRLDVV

SEQ ID NO: 440 - protein, 9 aa, Artificial Sequence
  Description of Artificial Sequence: Synthetic peptide
VLAEAMSQV

SEQ ID NO: 441 - protein, 10 aa, Artificial Sequence
  Description of Artificial Sequence: Synthetic peptide
ALAWDDLRNL

SEQ ID NO: 442 - protein, 9 aa, Artificial Sequence
  Description of Artificial Sequence: Synthetic peptide
IIAIVVWTI

SEQ ID NO: 443 - protein, 9 aa, Artificial Sequence
  Description of Artificial Sequence: Synthetic peptide
NVKTIIVQL

SEQ ID NO: 444 - protein, 9 aa, Artificial Sequence
  Description of Artificial Sequence: Synthetic peptide
AVAGWTDRV

SEQ ID NO: 445 - protein, 9 aa, Artificial Sequence
  Description of Artificial Sequence: Synthetic peptide
HLLSWGFTT

SEQ ID NO: 446 - protein, 9 aa, Artificial Sequence
  Description of Artificial Sequence: Synthetic peptide
IVTDSQYAL

SEQ ID NO: 447 - protein, 9 aa, Artificial Sequence
  Description of Artificial Sequence: Synthetic peptide
HLEGKVILV

SEQ ID NO: 448 - protein, 9 aa, Artificial Sequence
  Description of Artificial Sequence: Synthetic peptide
SIVTRTVEL

SEQ ID NO: 449 - protein, 9 aa, Artificial Sequence
  Description of Artificial Sequence: Synthetic peptide
VVAGWTDRV

SEQ ID NO: 450 - protein, 9 aa, Artificial Sequence
  Description of Artificial Sequence: Synthetic peptide
TLNNNTIEM

SEQ ID NO: 451 - protein, 9 aa, Artificial Sequence
  Description of Artificial Sequence: Synthetic peptide
SLFYRLDIV

SEQ ID NO: 452 - protein, 9 aa, Artificial Sequence
  Description of Artificial Sequence: Synthetic peptide
RILQQLLFV

SEQ ID NO: 453 - protein, 9 aa, Artificial Sequence
  Description of Artificial Sequence: Synthetic peptide
EISNWLWYI

SEQ ID NO: 454 - protein, 9 aa, Artificial Sequence
  Description of Artificial Sequence: Synthetic peptide
IVTDSQYVL

SEQ ID NO: 455 - protein, 9 aa, Artificial Sequence
  Description of Artificial Sequence: Synthetic peptide
ALNPGLLET

SEQ ID NO: 456 - protein, 9 aa, Artificial Sequence
  Description of Artificial Sequence: Synthetic peptide
KALTDIVTL

SEQ ID NO: 457 - protein, 8 aa, Artificial Sequence
  Description of Artificial Sequence: Synthetic peptide
VLSVINRV

SEQ ID NO: 458 - protein, 9 aa, Artificial Sequence
  Description of Artificial Sequence: Synthetic peptide
AIIRILQQL

SEQ ID NO: 459 - protein, 11 aa, Artificial Sequence
  Description of Artificial Sequence: Synthetic peptide
VQLGIPHPAGL

SEQ ID NO: 460 - protein, 10 aa, Artificial Sequence
  Description of Artificial Sequence: Synthetic peptide
RTQDFWEVQL

SEQ ID NO: 461 - protein, 10 aa, Artificial Sequence
  Description of Artificial Sequence: Synthetic peptide
YLRDQQLLGI

SEQ ID NO: 462 - protein, 9 aa, Artificial Sequence
  Description of Artificial Sequence: Synthetic peptide
LLDTIAIAV

SEQ ID NO: 463 - protein, 9 aa, Artificial Sequence
  Description of Artificial Sequence: Synthetic peptide
KIYSLFYRL

SEQ ID NO: 464 - protein, 9 aa, Artificial Sequence
  Description of Artificial Sequence: Synthetic peptide
LLSIVTRTV

SEQ ID NO: 465 - protein, 9 aa, Artificial Sequence
  Description of Artificial Sequence: Synthetic peptide
EGLKYLWNL

SEQ ID NO: 466 - protein, 9 aa, Artificial Sequence
  Description of Artificial Sequence: Synthetic peptide
AVVGLVVAL

SEQ ID NO: 467 - protein, 8 aa, Artificial Sequence
  Description of Artificial Sequence: Synthetic peptide
ALTDIVTL

SEQ ID NO: 468 - protein, 9 aa, Artificial Sequence
  Description of Artificial Sequence: Synthetic peptide
KLTPLCVTL

SEQ ID NO: 469 - protein, 10 aa, Artificial Sequence
  Description of Artificial Sequence: Synthetic peptide
ILIAARTVEL

SEQ ID NO: 470 - protein, 9 aa, Artificial Sequence
  Description of Artificial Sequence: Synthetic peptide
RVIETVQRL

SEQ ID NO: 471 - protein, 9 aa, Artificial Sequence
  Description of Artificial Sequence: Synthetic peptide
QLAEVVQKV

SEQ ID NO: 472 - protein, 9 aa, Artificial Sequence
  Description of Artificial Sequence: Synthetic peptide
RVIEIVQGI

SEQ ID NO: 473 - protein, 11 aa, Artificial Sequence
  Description of Artificial Sequence: Synthetic peptide
TQIDPDLADQL

SEQ ID NO: 474 - protein, 9 aa, Artificial Sequence
  Description of Artificial Sequence: Synthetic peptide
LVSQIIEKL

SEQ ID NO: 475 - protein, 9 aa, Artificial Sequence
  Description of Artificial Sequence: Synthetic peptide
AAVDLSHFL

SEQ ID NO: 476 - protein, 9 aa, Artificial Sequence
  Description of Artificial Sequence: Synthetic peptide
RVIEIGQGI

SEQ ID NO: 477 - protein, 9 aa, Artificial Sequence
  Description of Artificial Sequence: Synthetic peptide
VLAEAMSQV

SEQ ID NO: 478 - protein, 9 aa, Artificial Sequence
  Description of Artificial Sequence: Synthetic peptide
AVVGLVVAL

SEQ ID NO: 479 - protein, 9 aa, Artificial Sequence
  Description of Artificial Sequence: Synthetic peptide
VLAEAMSQA

SEQ ID NO: 480 - protein, 9 aa, Artificial Sequence
  Description of Artificial Sequence: Synthetic peptide
AVLSVINRV

SEQ ID NO: 481 - protein, 11 aa, Artificial Sequence
  Description of Artificial Sequence: Synthetic peptide
TQIDPDQADQL

SEQ ID NO: 482 - protein, 9 aa, Artificial Sequence
  Description of Artificial Sequence: Synthetic peptide
AVLSIINRV

SEQ ID NO: 483 - protein, 9 aa, Artificial Sequence
  Description of Artificial Sequence: Synthetic peptide
SQVQHTNIM

SEQ ID NO: 484 - protein, 11 aa, Artificial Sequence
  Description of Artificial Sequence: Synthetic peptide
VVIQDNSDIKV

SEQ ID NO: 485 - protein, 9 aa, Artificial Sequence
  Description of Artificial Sequence: Synthetic peptide
AVLSIISRV

SEQ ID NO: 486 - protein, 9 aa, Artificial Sequence
  Description of Artificial Sequence: Synthetic peptide
SAINLLDTI

SEQ ID NO: 487 - protein, 9 aa, Artificial Sequence
  Description of Artificial Sequence: Synthetic peptide
NVKNIIVQL

SEQ ID NO: 488 - protein, 9 aa, Artificial Sequence
  Description of Artificial Sequence: Synthetic peptide
WTVNDIQKL

SEQ ID NO: 489 - protein, 9 aa, Artificial Sequence
  Description of Artificial Sequence: Synthetic peptide
ATLEEMMTA

SEQ ID NO: 490 - protein, 9 aa, Artificial Sequence
  Description of Artificial Sequence: Synthetic peptide
GAASITLTV

SEQ ID NO: 491 - protein, 9 aa, Artificial Sequence
  Description of Artificial Sequence: Synthetic peptide
YDLGDINNL

SEQ ID NO: 492 - protein, 9 aa, Artificial Sequence
  Description of Artificial Sequence: Synthetic peptide
IVTDSQYAL

SEQ ID NO: 493 - protein, 9 aa, Artificial Sequence
  Description of Artificial Sequence: Synthetic peptide
TETLLIQNA

SEQ ID NO: 494 - protein, 9 aa, Artificial Sequence
  Description of Artificial Sequence: Synthetic peptide
SAVNLYDTI

SEQ ID NO: 495 - protein, 9 aa, Artificial Sequence
  Description of Artificial Sequence: Synthetic peptide
EQVPPLVSL

SEQ ID NO: 496 - protein, 9 aa, Artificial Sequence
  Description of Artificial Sequence: Synthetic peptide
SIVTRTVEL

SEQ ID NO: 497 - protein, 9 aa, Artificial Sequence
  Description of Artificial Sequence: Synthetic peptide
SVKTGTEEL

SEQ ID NO: 498 - protein, 9 aa, Artificial Sequence
  Description of Artificial Sequence: Synthetic peptide
QIMEQLQSA

SEQ ID NO: 499 - protein, 9 aa, Artificial Sequence
  Description of Artificial Sequence: Synthetic peptide
RTWNATDQL

SEQ ID NO: 500 - protein, 9 aa, Artificial Sequence
  Description of Artificial Sequence: Synthetic peptide
SLFNTVATL

SEQ ID NO: 501 - protein, 9 aa, Artificial Sequence
  Description of Artificial Sequence: Synthetic peptide
NTIEMKEEV

SEQ ID NO: 502 - protein, 9 aa, Artificial Sequence
  Description of Artificial Sequence: Synthetic peptide
NVKTIIVQL

SEQ ID NO: 503 - protein, 9 aa, Artificial Sequence
  Description of Artificial Sequence: Synthetic peptide
ASITLTVQA

SEQ ID NO: 504 - protein, 10 aa, Artificial Sequence
  Description of Artificial Sequence: Synthetic peptide
SQYALGIIQA

SEQ ID NO: 505 - protein, 9 aa, Artificial Sequence
  Description of Artificial Sequence: Synthetic peptide
SQIYAGIKV

SEQ ID NO: 506 - protein, 9 aa, Artificial Sequence
  Description of Artificial Sequence: Synthetic peptide
RAIEAQQHL

SEQ ID NO: 507 - protein, 9 aa, Artificial Sequence
  Description of Artificial Sequence: Synthetic peptide
AIVGLIVAL

SEQ ID NO: 508 - protein, 9 aa, Artificial Sequence
  Description of Artificial Sequence: Synthetic peptide
ALRTGTEEL

SEQ ID NO: 509 - protein, 9 aa, Artificial Sequence
  Description of Artificial Sequence: Synthetic peptide
LVNQIIEKL

SEQ ID NO: 510 - protein, 9 aa, Artificial Sequence
  Description of Artificial Sequence: Synthetic peptide
SQIYPGIKV

SEQ ID NO: 511 - protein, 9 aa, Artificial Sequence
  Description of Artificial Sequence: Synthetic peptide
SISERVLSA

SEQ ID NO: 512 - protein, 11 aa, Artificial Sequence
  Description of Artificial Sequence: Synthetic peptide
TQQEINEQELL

SEQ ID NO: 513 - protein, 10 aa, Artificial Sequence
  Description of Artificial Sequence: Synthetic peptide
GEIIGDIRKA

SEQ ID NO: 514 - protein, 9 aa, Artificial Sequence
  Description of Artificial Sequence: Synthetic peptide
AVAGWTDRV

SEQ ID NO: 515 - protein, 9 aa, Artificial Sequence
  Description of Artificial Sequence: Synthetic peptide
SLYNTVATL

SEQ ID NO: 516 - protein, 9 aa, Artificial Sequence
  Description of Artificial Sequence: Synthetic peptide
GEVGFPVRP

SEQ ID NO: 517 - protein, 9 aa, Artificial Sequence
  Description of Artificial Sequence: Synthetic peptide
VVAGWTDRV

SEQ ID NO: 518 - protein, 9 aa, Artificial Sequence
  Description of Artificial Sequence: Synthetic peptide
TETLLVQNA

SEQ ID NO: 519 - protein, 9 aa, Artificial Sequence
  Description of Artificial Sequence: Synthetic peptide
IEVKDTKEA

SEQ ID NO: 520 - protein, 9 aa, Artificial Sequence
  Description of Artificial Sequence: Synthetic peptide
FTSAAVKAA

SEQ ID NO: 521 - protein, 9 aa, Artificial Sequence
  Description of Artificial Sequence: Synthetic peptide
ILKDPVHGA

SEQ ID NO: 522 - protein, 10 aa, Artificial Sequence
  Description of Artificial Sequence: Synthetic peptide
KAYDTEVHNV

SEQ ID NO: 523 - protein, 9 aa, Artificial Sequence
  Description of Artificial Sequence: Synthetic peptide
ILKEPVHGV

SEQ ID NO: 524 - protein, 10 aa, Artificial Sequence
  Description of Artificial Sequence: Synthetic peptide
LTRDGGITSA

SEQ ID NO: 525 - protein, 9 aa, Artificial Sequence
  Description of Artificial Sequence: Synthetic peptide
DIIGDIRQA

SEQ ID NO: 526 - protein, 10 aa, Artificial Sequence
  Description of Artificial Sequence: Synthetic peptide
RQIDSISERV

SEQ ID NO: 527 - protein, 9 aa, Artificial Sequence
  Description of Artificial Sequence: Synthetic peptide
RVIEIVQGI

SEQ ID NO: 528 - protein, 9 aa, Artificial Sequence
  Description of Artificial Sequence: Synthetic peptide
RVIETVQRL

SEQ ID NO: 529 - protein, 9 aa, Artificial Sequence
  Description of Artificial Sequence: Synthetic peptide
AVLSVINRV

SEQ ID NO: 530 - protein, 9 aa, Artificial Sequence
  Description of Artificial Sequence: Synthetic peptide
QLAEVVQKV

SEQ ID NO: 531 - protein, 9 aa, Artificial Sequence
  Description of Artificial Sequence: Synthetic peptide
RVIEIGQGI

SEQ ID NO: 532 - protein, 9 aa, Artificial Sequence
  Description of Artificial Sequence: Synthetic peptide
IVTDSQYAL

SEQ ID NO: 533 - protein, 9 aa, Artificial Sequence
  Description of Artificial Sequence: Synthetic peptide
IQDNSDIKV

SEQ ID NO: 534 - protein, 11 aa, Artificial Sequence
  Description of Artificial Sequence: Synthetic peptide
VVIQDNSDIKV

SEQ ID NO: 535 - protein, 9 aa, Artificial Sequence
  Description of Artificial Sequence: Synthetic peptide
AVLSIISRV

SEQ ID NO: 536 - protein, 9 aa, Artificial Sequence
  Description of Artificial Sequence: Synthetic peptide
AVLSIINRV

SEQ ID NO: 537 - protein, 9 aa, Artificial Sequence
  Description of Artificial Sequence: Synthetic peptide
AVVGLVVAL

SEQ ID NO: 538 - protein, 9 aa, Artificial Sequence
  Description of Artificial Sequence: Synthetic peptide
AAVDLSHFL

SEQ ID NO: 539 - protein, 9 aa, Artificial Sequence
  Description of Artificial Sequence: Synthetic peptide
VLAEAMSQV

SEQ ID NO: 540 - protein, 9 aa, Artificial Sequence
  Description of Artificial Sequence: Synthetic peptide
SQIYAGIKV

SEQ ID NO: 541 - protein, 9 aa, Artificial Sequence
  Description of Artificial Sequence: Synthetic peptide
YDLGDINNL

SEQ ID NO: 542 - protein, 11 aa, Artificial Sequence
  Description of Artificial Sequence: Synthetic peptide
TQIDPDLADQL

SEQ ID NO: 543 - protein, 9 aa, Artificial Sequence
  Description of Artificial Sequence: Synthetic peptide
SAINLLDTI

SEQ ID NO: 544 - protein, 9 aa, Artificial Sequence
  Description of Artificial Sequence: Synthetic peptide
AIVGLIVAL

SEQ ID NO: 545 - protein, 9 aa, Artificial Sequence
  Description of Artificial Sequence: Synthetic peptide
GGIGGFIKV

SEQ ID NO: 546 - protein, 9 aa, Artificial Sequence
  Description of Artificial Sequence: Synthetic peptide
IVTDSQYVL

SEQ ID NO: 547 - protein, 9 aa, Artificial Sequence
  Description of Artificial Sequence: Synthetic peptide
SQIYPGIKV

SEQ ID NO: 548 - protein, 9 aa, Artificial Sequence
  Description of Artificial Sequence: Synthetic peptide
VQLNESVTI

SEQ ID NO: 549 - protein, 9 aa, Artificial Sequence
  Description of Artificial Sequence: Synthetic peptide
NTIEMKEEV

SEQ ID NO: 550 - protein, 9 aa, Artificial Sequence
  Description of Artificial Sequence: Synthetic peptide
YSTQIDPDL

SEQ ID NO: 551 - protein, 9 aa, Artificial Sequence
  Description of Artificial Sequence: Synthetic peptide
KALTDIVTL

SEQ ID NO: 552 - protein, 10 aa, Artificial Sequence
  Description of Artificial Sequence: Synthetic peptide
TVLDVGDAYF

SEQ ID NO: 553 - protein, 9 aa, Artificial Sequence
  Description of Artificial Sequence: Synthetic peptide
KALTDVVTL

SEQ ID NO: 554 - protein, 9 aa, Artificial Sequence
  Description of Artificial Sequence: Synthetic peptide
VLAEAMSQA

SEQ ID NO: 555 - protein, 9 aa, Artificial Sequence
  Description of Artificial Sequence: Synthetic peptide
SLVDTIAIV

SEQ ID NO: 556 - protein, 9 aa, Artificial Sequence
  Description of Artificial Sequence: Synthetic peptide
EQVPPLVSL

SEQ ID NO: 557 - protein, 10 aa, Artificial Sequence
  Description of Artificial Sequence: Synthetic peptide
KVVKIEPLGV

SEQ ID NO: 558 - protein, 11 aa, Artificial Sequence
  Description of Artificial Sequence: Synthetic peptide
TQIDPDQADQL

SEQ ID NO: 559 - protein, 9 aa, Artificial Sequence
  Description of Artificial Sequence: Synthetic peptide
GAASITLTV

SEQ ID NO: 560 - protein, 9 aa, Artificial Sequence
  Description of Artificial Sequence: Synthetic peptide
SIVTRTVEL

SEQ ID NO: 561 - protein, 9 aa, Artificial Sequence
  Description of Artificial Sequence: Synthetic peptide
QIMEQLQSA

SEQ ID NO: 562 - protein, 9 aa, Artificial Sequence
  Description of Artificial Sequence: Synthetic peptide
YQLEKDPIV

SEQ ID NO: 563 - protein, 9 aa, Artificial Sequence
  Description of Artificial Sequence: Synthetic peptide
YDLGNDINL

SEQ ID NO: 564 - protein, 9 aa, Artificial Sequence
  Description of Artificial Sequence: Synthetic peptide
YDLGDDNNL

SEQ ID NO: 565 - protein, 9 aa, Artificial Sequence
  Description of Artificial Sequence: Synthetic peptide
SAVNLYDTI

SEQ ID NO: 566 - protein, 9 aa, Artificial Sequence
  Description of Artificial Sequence: Synthetic peptide
LLDTIAIAV

SEQ ID NO: 567 - protein, 9 aa, Artificial Sequence
  Description of Artificial Sequence: Synthetic peptide
YVDRFFKTL

SEQ ID NO: 568 - protein, 9 aa, Artificial Sequence
  Description of Artificial Sequence: Synthetic peptide
SLDEIWENM

SEQ ID NO: 569 - protein, 9 aa, Artificial Sequence
  Description of Artificial Sequence: Synthetic peptide
QLAEVVQKV

SEQ ID NO: 570 - protein, 9 aa, Artificial Sequence
  Description of Artificial Sequence: Synthetic peptide
AVLSVINRV

SEQ ID NO: 571 - protein, 9 aa, Artificial Sequence
  Description of Artificial Sequence: Synthetic peptide
YVDRFFKAL

SEQ ID NO: 572 - protein, 9 aa, Artificial Sequence
  Description of Artificial Sequence: Synthetic peptide
LVDTIAIVV

SEQ ID NO: 573 - protein, 9 aa, Artificial Sequence
  Description of Artificial Sequence: Synthetic peptide
AVLSIINRV

SEQ ID NO: 574 - protein, 10 aa, Artificial Sequence
  Description of Artificial Sequence: Synthetic peptide
TLWQRPIVTV

SEQ ID NO: 575 - protein, 9 aa, Artificial Sequence
  Description of Artificial Sequence: Synthetic peptide
AVLSIISRV

SEQ ID NO: 576 - protein, 10 aa, Artificial Sequence
  Description of Artificial Sequence: Synthetic peptide
TLWQRPLVTV

SEQ ID NO: 577 - protein, 9 aa, Artificial Sequence
  Description of Artificial Sequence: Synthetic peptide
WTDRVIETV

SEQ ID NO: 578 - protein, 9 aa, Artificial Sequence
  Description of Artificial Sequence: Synthetic peptide
ILKEPVHGV

SEQ ID NO: 579 - protein, 9 aa, Artificial Sequence
  Description of Artificial Sequence: Synthetic peptide
QIDSISERV

SEQ ID NO: 580 - protein, 9 aa, Artificial Sequence
  Description of Artificial Sequence: Synthetic peptide
RVIETVQRL

SEQ ID NO: 581 - protein, 9 aa, Artificial Sequence
  Description of Artificial Sequence: Synthetic peptide
FSPEVIPMF

SEQ ID NO: 582 - protein, 9 aa, Artificial Sequence
  Description of Artificial Sequence: Synthetic peptide
YDLGDINNL

SEQ ID NO: 583 - protein, 9 aa, Artificial Sequence
  Description of Artificial Sequence: Synthetic peptide
VLAEAMSQV

SEQ ID NO: 584 - protein, 9 aa, Artificial Sequence
  Description of Artificial Sequence: Synthetic peptide
IIDIIASDL

SEQ ID NO: 585 - protein, 9 aa, Artificial Sequence
  Description of Artificial Sequence: Synthetic peptide
YVDRFFKIL

SEQ ID NO: 586 - protein, 9 aa, Artificial Sequence
  Description of Artificial Sequence: Synthetic peptide
RVIEIVQGI

SEQ ID NO: 587 - protein, 9 aa, Artificial Sequence
  Description of Artificial Sequence: Synthetic peptide
HLEGKVILV

SEQ ID NO: 588 - protein, 9 aa, Artificial Sequence
  Description of Artificial Sequence: Synthetic peptide
RVIETVQRL

SEQ ID NO: 589 - protein, 9 aa, Artificial Sequence
  Description of Artificial Sequence: Synthetic peptide
RVIEIVQGI

SEQ ID NO: 590 - protein, 9 aa, Artificial Sequence
  Description of Artificial Sequence: Synthetic peptide
LVSQIIEKL

SEQ ID NO: 591 - protein, 9 aa, Artificial Sequence
  Description of Artificial Sequence: Synthetic peptide
RVIEIGQGI

SEQ ID NO: 592 - protein, 9 aa, Artificial Sequence
  Description of Artificial Sequence: Synthetic peptide
KVISLTETT

SEQ ID NO: 593 - protein, 9 aa, Artificial Sequence
  Description of Artificial Sequence: Synthetic peptide
QLAEVVQKV

SEQ ID NO: 594 - protein, 9 aa, Artificial Sequence
  Description of Artificial Sequence: Synthetic peptide
AVVGLVVAL

SEQ ID NO: 595 - protein, 10 aa, Artificial Sequence
  Description of Artificial Sequence: Synthetic peptide
KVVKIEPLGV

SEQ ID NO: 596 - protein, 9 aa, Artificial Sequence
  Description of Artificial Sequence: Synthetic peptide
AVLSVINRV

SEQ ID NO: 597 - protein, 9 aa, Artificial Sequence
  Description of Artificial Sequence: Synthetic peptide
AVLSIINRV

SEQ ID NO: 598 - protein, 9 aa, Artificial Sequence
  Description of Artificial Sequence: Synthetic peptide
AVLSIISRV

SEQ ID NO: 599 - protein, 9 aa, Artificial Sequence
  Description of Artificial Sequence: Synthetic peptide
AIIRTLQQL

SEQ ID NO: 600 - protein, 9 aa, Artificial Sequence
  Description of Artificial Sequence: Synthetic peptide
KVVSLTETT

SEQ ID NO: 601 - protein, 9 aa, Artificial Sequence
  Description of Artificial Sequence: Synthetic peptide
WTVNDIQKL

SEQ ID NO: 602 - protein, 9 aa, Artificial Sequence
  Description of Artificial Sequence: Synthetic peptide
SVKTGTEEL

SEQ ID NO: 603 - protein, 9 aa, Artificial Sequence
  Description of Artificial Sequence: Synthetic peptide
AIIRILQQL

SEQ ID NO: 604 - protein, 9 aa, Artificial Sequence
  Description of Artificial Sequence: Synthetic peptide
IVTRTVELL

SEQ ID NO: 605 - protein, 9 aa, Artificial Sequence
  Description of Artificial Sequence: Synthetic peptide
VLAEAMSQA

SEQ ID NO: 606 - protein, 10 aa, Artificial Sequence
  Description of Artificial Sequence: Synthetic peptide
KAYDTEVHNV

SEQ ID NO: 607 - protein, 10 aa, Artificial Sequence
  Description of Artificial Sequence: Synthetic peptide
IEIGQGICRA

SEQ ID NO: 608 - protein, 9 aa, Artificial Sequence
  Description of Artificial Sequence: Synthetic peptide
LEKDPIVGA

SEQ ID NO: 609 - protein, 10 aa, Artificial Sequence
  Description of Artificial Sequence: Synthetic peptide
KIIEQLQPSV

SEQ ID NO: 610 - protein, 9 aa, Artificial Sequence
  Description of Artificial Sequence: Synthetic peptide
KIKPPLPSV

SEQ ID NO: 611 - protein, 9 aa, Artificial Sequence
  Description of Artificial Sequence: Synthetic peptide
LVNQIIEKL

SEQ ID NO: 612 - protein, 9 aa, Artificial Sequence
  Description of Artificial Sequence: Synthetic peptide
AIVGLIVAL

SEQ ID NO: 613 - protein, 9 aa, Artificial Sequence
  Description of Artificial Sequence: Synthetic peptide
RTWNATDQL

SEQ ID NO: 614 - protein, 9 aa, Artificial Sequence
  Description of Artificial Sequence: Synthetic peptide
VLAEAMSQV

SEQ ID NO: 615 - protein, 9 aa, Artificial Sequence
  Description of Artificial Sequence: Synthetic peptide
IIAKEIVAC

SEQ ID NO: 616 - protein, 10 aa, Artificial Sequence
  Description of Artificial Sequence: Synthetic peptide
RVLAEAMSQV

SEQ ID NO: 617 - protein, 11 aa, Artificial Sequence
  Description of Artificial Sequence: Synthetic peptide
VVIQDNSDIKV

SEQ ID NO: 618 - protein, 9 aa, Artificial Sequence
  Description of Artificial Sequence: Synthetic peptide
QIMEQLQSA

SEQ ID NO: 619 - protein, 9 aa, Artificial Sequence
  Description of Artificial Sequence: Synthetic peptide
GTAGSTMGA

SEQ ID NO: 620 - protein, 9 aa, Artificial Sequence
  Description of Artificial Sequence: Synthetic peptide
NVKNIIVQL

SEQ ID NO: 621 - protein, 10 aa, Artificial Sequence
  Description of Artificial Sequence: Synthetic peptide
RVLAEAMSQA

SEQ ID NO: 622 - protein, 10 aa, Artificial Sequence
  Description of Artificial Sequence: Synthetic peptide
KQYDQILIEI

SEQ ID NO: 623 - protein, 9 aa, Artificial Sequence
  Description of Artificial Sequence: Synthetic peptide
IEVKDTKEA

SEQ ID NO: 624 - protein, 10 aa, Artificial Sequence
  Description of Artificial Sequence: Synthetic peptide
KVVKLEPLGV

SEQ ID NO: 625 - protein, 9 aa, Artificial Sequence
  Description of Artificial Sequence: Synthetic peptide
ILKEPVHGV

SEQ ID NO: 626 - protein, 9 aa, Artificial Sequence
  Description of Artificial Sequence: Synthetic peptide
GEVGFPVRP

SEQ ID NO: 627 - protein, 10 aa, Artificial Sequence
  Description of Artificial Sequence: Synthetic peptide
RQIDSISERV

SEQ ID NO: 628 - protein, 10 aa, Artificial Sequence
  Description of Artificial Sequence: Synthetic peptide
KQYDQISIEI

SEQ ID NO: 629 - protein, 9 aa, Artificial Sequence
  Description of Artificial Sequence: Synthetic peptide
EIIGDIRKA

SEQ ID NO: 630 - protein, 9 aa, Artificial Sequence
  Description of Artificial Sequence: Synthetic peptide
VVKIEPLGV

SEQ ID NO: 631 - protein, 9 aa, Artificial Sequence
  Description of Artificial Sequence: Synthetic peptide
QIYPGIKVK

SEQ ID NO: 632 - protein, 9 aa, Artificial Sequence
  Description of Artificial Sequence: Synthetic peptide
QIYAGIKVK

SEQ ID NO: 633 - protein, 9 aa, Artificial Sequence
  Description of Artificial Sequence: Synthetic peptide
RILEPVRSK

SEQ ID NO: 634 - protein, 9 aa, Artificial Sequence
  Description of Artificial Sequence: Synthetic peptide
ALKALVTPK

SEQ ID NO: 635 - protein, 9 aa, Artificial Sequence
  Description of Artificial Sequence: Synthetic peptide
AIFQSSMTK

SEQ ID NO: 636 - protein, 10 aa, Artificial Sequence
  Description of Artificial Sequence: Synthetic peptide
RIKPPLPSVK

SEQ ID NO: 637 - protein, 9 aa, Artificial Sequence
  Description of Artificial Sequence: Synthetic peptide
RTNSPTSSR

SEQ ID NO: 638 - protein, 9 aa, Artificial Sequence
  Description of Artificial Sequence: Synthetic peptide
AIFQASMTK

SEQ ID NO: 639 - protein, 9 aa, Artificial Sequence
  Description of Artificial Sequence: Synthetic peptide
KILEPFRSK

SEQ ID NO: 640 - protein, 9 aa, Artificial Sequence
  Description of Artificial Sequence: Synthetic peptide
KILEPYRAK

SEQ ID NO: 641 - protein, 9 aa, Artificial Sequence
  Description of Artificial Sequence: Synthetic peptide
ALRALVEPK

SEQ ID NO: 642 - protein, 10 aa, Artificial Sequence
  Description of Artificial Sequence: Synthetic peptide
TVYYGVPVWK

SEQ ID NO: 643 - protein, 11 aa, Artificial Sequence
  Description of Artificial Sequence: Synthetic peptide
TVNDIQKLVGK

SEQ ID NO: 644 - protein, 11 aa, Artificial Sequence
  Description of Artificial Sequence: Synthetic peptide
RIKPPLPSVKK

SEQ ID NO: 645 - protein, 9 aa, Artificial Sequence
  Description of Artificial Sequence: Synthetic peptide
IIASDLQTK

SEQ ID NO: 646 - protein, 10 aa, Artificial Sequence
  Description of Artificial Sequence: Synthetic peptide
TVYYGVPIWK

SEQ ID NO: 647 - protein, 10 aa, Artificial Sequence
  Description of Artificial Sequence: Synthetic peptide
SLFGNDPLSQ

SEQ ID NO: 648 - protein, 9 aa, Artificial Sequence
  Description of Artificial Sequence: Synthetic peptide
QIIEKLIGK

SEQ ID NO: 649 - protein, 10 aa, Artificial Sequence
  Description of Artificial Sequence: Synthetic peptide
TLNNSTHSNK

SEQ ID NO: 650 - protein, 10 aa, Artificial Sequence
  Description of Artificial Sequence: Synthetic peptide
RIRQTPTAAR

SEQ ID NO: 651 - protein, 11 aa, Artificial Sequence
  Description of Artificial Sequence: Synthetic peptide
TVNDIQKLVGK

SEQ ID NO: 652 - protein, 10 aa, Artificial Sequence
  Description of Artificial Sequence: Synthetic peptide
TVQPINLPEK

SEQ ID NO: 653 - protein, 9 aa, Artificial Sequence
  Description of Artificial Sequence: Synthetic peptide
QIYPGIKVK

SEQ ID NO: 654 - protein, 10 aa, Artificial Sequence
  Description of Artificial Sequence: Synthetic peptide
TVQPIVLPDK

SEQ ID NO: 655 - protein, 9 aa, Artificial Sequence
  Description of Artificial Sequence: Synthetic peptide
GLDGLVYSK

SEQ ID NO: 656 - protein, 10 aa, Artificial Sequence
  Description of Artificial Sequence: Synthetic peptide
TVQPIELPEK

SEQ ID NO: 657 - protein, 9 aa, Artificial Sequence
  Description of Artificial Sequence: Synthetic peptide
VVNKTEWNK

SEQ ID NO: 658 - protein, 9 aa, Artificial Sequence
  Description of Artificial Sequence: Synthetic peptide
AIFQSSMTK

SEQ ID NO: 659 - protein, 9 aa, Artificial Sequence
  Description of Artificial Sequence: Synthetic peptide
GLDGLIYSK

SEQ ID NO: 660 - protein, 10 aa, Artificial Sequence
  Description of Artificial Sequence: Synthetic peptide
GSNFTSAAVK

SEQ ID NO: 661 - protein, 9 aa, Artificial Sequence
  Description of Artificial Sequence: Synthetic peptide
ALKALVTPK

SEQ ID NO: 662 - protein, 9 aa, Artificial Sequence
  Description of Artificial Sequence: Synthetic peptide
IIASDLQTK

SEQ ID NO: 663 - protein, 11 aa, Artificial Sequence
  Description of Artificial Sequence: Synthetic peptide
KIEPLGVAPTK

SEQ ID NO: 664 - protein, 9 aa, Artificial Sequence
  Description of Artificial Sequence: Synthetic peptide
RILEPVRSK

SEQ ID NO: 665 - protein, 11 aa, Artificial Sequence
  Description of Artificial Sequence: Synthetic peptide
VVSLTETTNQK

SEQ ID NO: 666 - protein, 9 aa, Artificial Sequence
  Description of Artificial Sequence: Synthetic peptide
AVDLSHFLK

SEQ ID NO: 667 - protein, 9 aa, Artificial Sequence
  Description of Artificial Sequence: Synthetic peptide
QIYAGIKVK

SEQ ID NO: 668 - protein, 9 aa, Artificial Sequence
  Description of Artificial Sequence: Synthetic peptide
QSNPYPEPK

SEQ ID NO: 669 - protein, 11 aa, Artificial Sequence
  Description of Artificial Sequence: Synthetic peptide
ATGEIIGDIRK

SEQ ID NO: 670 - protein, 9 aa, Artificial Sequence
  Description of Artificial Sequence: Synthetic peptide
APAGFAILK

SEQ ID NO: 671 - protein, 9 aa, Artificial Sequence
  Description of Artificial Sequence: Synthetic peptide
AIFQASMTK

SEQ ID NO: 672 - protein, 11 aa, Artificial Sequence
  Description of Artificial Sequence: Synthetic peptide
QSQGVVESMNK

SEQ ID NO: 673 - protein, 10 aa, Artificial Sequence
  Description of Artificial Sequence: Synthetic peptide
TLNNSTHSNK

SEQ ID NO: 674 - protein, 10 aa, Artificial Sequence
  Description of Artificial Sequence: Synthetic peptide
GGLDGLVYSK

SEQ ID NO: 675 - protein, 9 aa, Artificial Sequence
  Description of Artificial Sequence: Synthetic peptide
IIATDIQTK

SEQ ID NO: 676 - protein, 9 aa, Artificial Sequence
  Description of Artificial Sequence: Synthetic peptide
STITQACPK

SEQ ID NO: 677 - protein, 11 aa, Artificial Sequence
  Description of Artificial Sequence: Synthetic peptide
RVIEIVQGIGR

SEQ ID NO: 678 - protein, 11 aa, Artificial Sequence
  Description of Artificial Sequence: Synthetic peptide
RVIEIGQGICR

SEQ ID NO: 679 - protein, 10 aa, Artificial Sequence
  Description of Artificial Sequence: Synthetic peptide
SVKTGTEELK

SEQ ID NO: 680 - protein, 11 aa, Artificial Sequence
  Description of Artificial Sequence: Synthetic peptide
ATDIQTKELQK

SEQ ID NO: 681 - protein, 10 aa, Artificial Sequence
  Description of Artificial Sequence: Synthetic peptide
SILDIKQGPK

SEQ ID NO: 682 - protein, 10 aa, Artificial Sequence
  Description of Artificial Sequence: Synthetic peptide
VVESMNKELK

SEQ ID NO: 683 - protein, 11 aa, Artificial Sequence
  Description of Artificial Sequence: Synthetic peptide
ATGEIIGDIRK

SEQ ID NO: 684 - protein, 9 aa, Artificial Sequence
  Description of Artificial Sequence: Synthetic peptide
QIYPGIKVK

SEQ ID NO: 685 - protein, 9 aa, Artificial Sequence
  Description of Artificial Sequence: Synthetic peptide
STITQACPK

SEQ ID NO: 686 - protein, 11 aa, Artificial Sequence
  Description of Artificial Sequence: Synthetic peptide
TVNDIQKLVGK

SEQ ID NO: 687 - protein, 9 aa, Artificial Sequence
  Description of Artificial Sequence: Synthetic peptide
QIYAGIKVK

SEQ ID NO: 688 - protein, 9 aa, Artificial Sequence
  Description of Artificial Sequence: Synthetic peptide
APAGFAILK

SEQ ID NO: 689 - protein, 10 aa, Artificial Sequence
  Description of Artificial Sequence: Synthetic peptide
TVQPINLPEK

SEQ ID NO: 690 - protein, 9 aa, Artificial Sequence
  Description of Artificial Sequence: Synthetic peptide
AVDLSHFLK

SEQ ID NO: 691 - protein, 9 aa, Artificial Sequence
  Description of Artificial Sequence: Synthetic peptide
RILEPVRSK

SEQ ID NO: 692 - protein, 9 aa, Artificial Sequence
  Description of Artificial Sequence: Synthetic peptide
QSNPYPEPK

SEQ ID NO: 693 - protein, 10 aa, Artificial Sequence
  Description of Artificial Sequence: Synthetic peptide
AAVDLSHFLK

SEQ ID NO: 694 - protein, 10 aa, Artificial Sequence
  Description of Artificial Sequence: Synthetic peptide
GSNFTSAAVK

SEQ ID NO: 695 - protein, 9 aa, Artificial Sequence
  Description of Artificial Sequence: Synthetic peptide
APAGYAILK

SEQ ID NO: 696 - protein, 10 aa, Artificial Sequence
  Description of Artificial Sequence: Synthetic peptide
GGLDGLVYSK

SEQ ID NO: 697 - protein, 11 aa, Artificial Sequence
  Description of Artificial Sequence: Synthetic peptide
ATDIQTKELQK

SEQ ID NO: 698 - protein, 10 aa, Artificial Sequence
  Description of Artificial Sequence: Synthetic peptide
GGLDGLIYSK

SEQ ID NO: 699 - protein, 9 aa, Artificial Sequence
  Description of Artificial Sequence: Synthetic peptide
AIFQSSMTK

SEQ ID NO: 700 - protein, 9 aa, Artificial Sequence
  Description of Artificial Sequence: Synthetic peptide
GSLQYLALK

SEQ ID NO: 701 - protein, 10 aa, Artificial Sequence
  Description of Artificial Sequence: Synthetic peptide
TVQPIELPEK

SEQ ID NO: 702 - protein, 10 aa, Artificial Sequence
  Description of Artificial Sequence: Synthetic peptide
TVQPIVLPDK

SEQ ID NO: 703 - protein, 9 aa, Artificial Sequence
  Description of Artificial Sequence: Synthetic peptide
VVNKTEWNK

SEQ ID NO: 704 - protein, 10 aa, Artificial Sequence
  Description of Artificial Sequence: Synthetic peptide
ASMTLTVQAR

SEQ ID NO: 705 - protein, 11 aa, Artificial Sequence
  Description of Artificial Sequence: Synthetic peptide
RVIEIVQGIGR

SEQ ID NO: 706 - protein, 9 aa, Artificial Sequence
  Description of Artificial Sequence: Synthetic peptide
QIIEKLIEK

SEQ ID NO: 707 - protein, 11 aa, Artificial Sequence
  Description of Artificial Sequence: Synthetic peptide
RVIEIGQGICR

SEQ ID NO: 708 - protein, 11 aa, Artificial Sequence
  Description of Artificial Sequence: Synthetic peptide
VVSLTETTNQK

SEQ ID NO: 709 - protein, 9 aa, Artificial Sequence
  Description of Artificial Sequence: Synthetic peptide
QIIEKLIGK

SEQ ID NO: 710 - protein, 9 aa, Artificial Sequence
  Description of Artificial Sequence: Synthetic peptide
SAITQACPK

SEQ ID NO: 711 - protein, 8 aa, Artificial Sequence
  Description of Artificial Sequence: Synthetic peptide
PAGYAILK

SEQ ID NO: 712 - protein, 10 aa, Artificial Sequence
  Description of Artificial Sequence: Synthetic peptide
SQIYPGIKVK

SEQ ID NO: 713 - protein, 11 aa, Artificial Sequence
  Description of Artificial Sequence: Synthetic peptide
GIGEEIASPPK

SEQ ID NO: 714 - protein, 10 aa, Artificial Sequence
  Description of Artificial Sequence: Synthetic peptide
AQQTSIMMQR

SEQ ID NO: 715 - protein, 11 aa, Artificial Sequence
  Description of Artificial Sequence: Synthetic peptide
STLNNSTHSNK

SEQ ID NO: 716 - protein, 11 aa, Artificial Sequence
  Description of Artificial Sequence: Synthetic peptide
GVVESMNKELK

SEQ ID NO: 717 - protein, 9 aa, Artificial Sequence
  Description of Artificial Sequence: Synthetic peptide
GLDGLIYSK

SEQ ID NO: 718 - protein, 9 aa, Artificial Sequence
  Description of Artificial Sequence: Synthetic peptide
AIFQASMTK

SEQ ID NO: 719 - protein, 9 aa, Artificial Sequence
  Description of Artificial Sequence: Synthetic peptide
SALTQACPK

SEQ ID NO: 720 - protein, 9 aa, Artificial Sequence
  Description of Artificial Sequence: Synthetic peptide
GLDGLVYSK

SEQ ID NO: 721 - protein, 10 aa, Artificial Sequence
  Description of Artificial Sequence: Synthetic peptide
CTPAGYAILK

SEQ ID NO: 722 - protein, 11 aa, Artificial Sequence
  Description of Artificial Sequence: Synthetic peptide
VVMESIVIWGK

SEQ ID NO: 723 - protein, 10 aa, Artificial Sequence
  Description of Artificial Sequence: Synthetic peptide
SILDIKQGPK

SEQ ID NO: 724 - protein, 9 aa, Artificial Sequence
  Description of Artificial Sequence: Synthetic peptide
RTNSPTSSR

SEQ ID NO: 725 - protein, 11 aa, Artificial Sequence
  Description of Artificial Sequence: Synthetic peptide
ASITLTVQARK

SEQ ID NO: 726 - protein, 9 aa, Artificial Sequence
  Description of Artificial Sequence: Synthetic peptide
RVIETVQRL

SEQ ID NO: 727 - protein, 9 aa, Artificial Sequence
  Description of Artificial Sequence: Synthetic peptide
NYTQIIYNL

SEQ ID NO: 728 - protein, 10 aa, Artificial Sequence
  Description of Artificial Sequence: Synthetic peptide
TYFKNKTISF

SEQ ID NO: 729 - protein, 9 aa, Artificial Sequence
  Description of Artificial Sequence: Synthetic peptide
NYTIKIYEL

SEQ ID NO: 730 - protein, 9 aa, Artificial Sequence
  Description of Artificial Sequence: Synthetic peptide
DYVDRFFKI

SEQ ID NO: 731 - protein, 9 aa, Artificial Sequence
  Description of Artificial Sequence: Synthetic peptide
SYLRDQQLL

SEQ ID NO: 732 - protein, 9 aa, Artificial Sequence
  Description of Artificial Sequence: Synthetic peptide
VYWSQELKI

SEQ ID NO: 733 - protein, 9 aa, Artificial Sequence
  Description of Artificial Sequence: Synthetic peptide
IYQEPFKNL

SEQ ID NO: 734 - protein, 9 aa, Artificial Sequence
  Description of Artificial Sequence: Synthetic peptide
TENLWVTVY

SEQ ID NO: 735 - protein, 9 aa, Artificial Sequence
  Description of Artificial Sequence: Synthetic peptide
RYLKDQQLL

SEQ ID NO: 736 - protein, 10 aa, Artificial Sequence
  Description of Artificial Sequence: Synthetic peptide
KYWNNNTIIF

SEQ ID NO: 737 - protein, 9 aa, Artificial Sequence
  Description of Artificial Sequence: Synthetic peptide
NYTNLIYGL

SEQ ID NO: 738 - protein, 9 aa, Artificial Sequence
  Description of Artificial Sequence: Synthetic peptide
KQITKIQKF

SEQ ID NO: 739 - protein, 9 aa, Artificial Sequence
  Description of Artificial Sequence: Synthetic peptide
RYLRDQQLL

SEQ ID NO: 740 - protein, 9 aa, Artificial Sequence
  Description of Artificial Sequence: Synthetic peptide
YDLGDINNL

SEQ ID NO: 741 - protein, 9 aa, Artificial Sequence
  Description of Artificial Sequence: Synthetic peptide
AENLWVTVY

SEQ ID NO: 742 - protein, 9 aa, Artificial Sequence
  Description of Artificial Sequence: Synthetic peptide
NYTQIIYNL

SEQ ID NO: 743 - protein, 9 aa, Artificial Sequence
  Description of Artificial Sequence: Synthetic peptide
SYLRDQQLL

SEQ ID NO: 744 - protein, 10 aa, Artificial Sequence
  Description of Artificial Sequence: Synthetic peptide
TYFKNKTISF

SEQ ID NO: 745 - protein, 9 aa, Artificial Sequence
  Description of Artificial Sequence: Synthetic peptide
IYQEPFKNL

SEQ ID NO: 746 - protein, 9 aa, Artificial Sequence
  Description of Artificial Sequence: Synthetic peptide
FYKLDVVQI

SEQ ID NO: 747 - protein, 9 aa, Artificial Sequence
  Description of Artificial Sequence: Synthetic peptide
RYLKDQQLL

SEQ ID NO: 748 - protein, 9 aa, Artificial Sequence
  Description of Artificial Sequence: Synthetic peptide
YYDPSKELI

SEQ ID NO: 749 - protein, 9 aa, Artificial Sequence
  Description of Artificial Sequence: Synthetic peptide
NYTIKIYEL

SEQ ID NO: 750 - protein, 9 aa, Artificial Sequence
  Description of Artificial Sequence: Synthetic peptide
IYNTYGDTW

SEQ ID NO: 751 - protein, 9 aa, Artificial Sequence
  Description of Artificial Sequence: Synthetic peptide
DYVDRFFKI

SEQ ID NO: 752 - protein, 8 aa, Artificial Sequence
  Description of Artificial Sequence: Synthetic peptide
SYNITTEL

SEQ ID NO: 753 - protein, 9 aa, Artificial Sequence
  Description of Artificial Sequence: Synthetic peptide
RYLRDQQLL

SEQ ID NO: 754 - protein, 9 aa, Artificial Sequence
  Description of Artificial Sequence: Synthetic peptide
NYTNLIYGL

SEQ ID NO: 755 - protein, 9 aa, Artificial Sequence
  Description of Artificial Sequence: Synthetic peptide
YYDPSKDLI

SEQ ID NO: 756 - protein, 10 aa, Artificial Sequence
  Description of Artificial Sequence: Synthetic peptide
DTIAIAVAGW

SEQ ID NO: 757 - protein, 10 aa, Artificial Sequence
  Description of Artificial Sequence: Synthetic peptide
DTIAIVVAGW

SEQ ID NO: 758 - protein, 10 aa, Artificial Sequence
  Description of Artificial Sequence: Synthetic peptide
DTINEEAAEW

SEQ ID NO: 759 - protein, 9 aa, Artificial Sequence
  Description of Artificial Sequence: Synthetic peptide
EVIPMFSAL

SEQ ID NO: 760 - protein, 10 aa, Artificial Sequence
  Description of Artificial Sequence: Synthetic peptide
EQATQEVKSW

SEQ ID NO: 761 - protein, 10 aa, Artificial Sequence
  Description of Artificial Sequence: Synthetic peptide
DSSGLFNSTW

SEQ ID NO: 762 - protein, 10 aa, Artificial Sequence
  Description of Artificial Sequence: Synthetic peptide
EQATQEVKGW

SEQ ID NO: 763 - protein, 10 aa, Artificial Sequence
  Description of Artificial Sequence: Synthetic peptide
DTINEEAADW

SEQ ID NO: 764 - protein, 9 aa, Artificial Sequence
  Description of Artificial Sequence: Synthetic peptide
TIAIAVAGW

SEQ ID NO: 765 - protein, 10 aa, Artificial Sequence
  Description of Artificial Sequence: Synthetic peptide
EQATQDVKHW

SEQ ID NO: 766 - protein, 10 aa, Artificial Sequence
  Description of Artificial Sequence: Synthetic peptide
NTSGLFNSTW

SEQ ID NO: 767 - protein, 9 aa, Artificial Sequence
  Description of Artificial Sequence: Synthetic peptide
TIAIVVAGW

SEQ ID NO: 768 - protein, 9 aa, Artificial Sequence
  Description of Artificial Sequence: Synthetic peptide
ETPGTRYQY

SEQ ID NO: 769 - protein, 10 aa, Artificial Sequence
  Description of Artificial Sequence: Synthetic peptide
EVNIVTDSQY

SEQ ID NO: 770 - protein, 10 aa, Artificial Sequence
  Description of Artificial Sequence: Synthetic peptide
EVNIVTDSQY

SEQ ID NO: 771 - protein, 9 aa, Artificial Sequence
  Description of Artificial Sequence: Synthetic peptide
EVIPMFSAL

SEQ ID NO: 772 - protein, 9 aa, Artificial Sequence
  Description of Artificial Sequence: Synthetic peptide
ETPGTRYQY

SEQ ID NO: 773 - protein, 10 aa, Artificial Sequence
  Description of Artificial Sequence: Synthetic peptide
DTIAIAVAGW

SEQ ID NO: 774 - protein, 9 aa, Artificial Sequence
  Description of Artificial Sequence: Synthetic peptide
ETKLGKAGY

SEQ ID NO: 775 - protein, 9 aa, Artificial Sequence
  Description of Artificial Sequence: Synthetic peptide
ETPGIRYQY

SEQ ID NO: 776 - protein, 10 aa, Artificial Sequence
  Description of Artificial Sequence: Synthetic peptide
ETTNQKTELY

SEQ ID NO: 777 - protein, 10 aa, Artificial Sequence
  Description of Artificial Sequence: Synthetic peptide
DTIAIVVAGW

SEQ ID NO: 778 - protein, 10 aa, Artificial Sequence
  Description of Artificial Sequence: Synthetic peptide
EVIPAETGQE

SEQ ID NO: 779 - protein, 9 aa, Artificial Sequence
  Description of Artificial Sequence: Synthetic peptide
EIIGDIRKA

SEQ ID NO: 780 - protein, 9 aa, Artificial Sequence
  Description of Artificial Sequence: Synthetic peptide
DIIGDIRQA

SEQ ID NO: 781 - protein, 10 aa, Artificial Sequence
  Description of Artificial Sequence: Synthetic peptide
ETFRPGGGDM

SEQ ID NO: 782 - protein, 9 aa, Artificial Sequence
  Description of Artificial Sequence: Synthetic peptide
EVIPAETGQ

SEQ ID NO: 783 - protein, 9 aa, Artificial Sequence
  Description of Artificial Sequence: Synthetic peptide
TTNQKTELY

SEQ ID NO: 784 - protein, 9 aa, Artificial Sequence
  Description of Artificial Sequence: Synthetic peptide
EVIPMFSAL

SEQ ID NO: 785 - protein, 10 aa, Artificial Sequence
  Description of Artificial Sequence: Synthetic peptide
EVNIVTDSQY

SEQ ID NO: 786 - protein, 10 aa, Artificial Sequence
  Description of Artificial Sequence: Synthetic peptide
NIVGGHQAAM

SEQ ID NO: 787 - protein, 10 aa, Artificial Sequence
  Description of Artificial Sequence: Synthetic peptide
DTIAIAVAGW

SEQ ID NO: 788 - protein, 10 aa, Artificial Sequence
  Description of Artificial Sequence: Synthetic peptide
DTIAIVVAGW

SEQ ID NO: 789 - protein, 9 aa, Artificial Sequence
  Description of Artificial Sequence: Synthetic peptide
EQVPPLVSL

SEQ ID NO: 790 - protein, 9 aa, Artificial Sequence
  Description of Artificial Sequence: Synthetic peptide
NVKNIIVQL

SEQ ID NO: 791 - protein, 9 aa, Artificial Sequence
  Description of Artificial Sequence: Synthetic peptide
EVIPMFSAL

SEQ ID NO: 792 - protein, 10 aa, Artificial Sequence
  Description of Artificial Sequence: Synthetic peptide
DIIATDIQTR

SEQ ID NO: 793 - protein, 9 aa, Artificial Sequence
  Description of Artificial Sequence: Synthetic peptide
EIIGDIRKA

SEQ ID NO: 794 - protein, 9 aa, Artificial Sequence
  Description of Artificial Sequence: Synthetic peptide
DIIGDIRQA

SEQ ID NO: 795 - protein, 10 aa, Artificial Sequence
  Description of Artificial Sequence: Synthetic peptide
DTIAIAVAGW

SEQ ID NO: 796 - protein, 10 aa, Artificial Sequence
  Description of Artificial Sequence: Synthetic peptide
DTIAIVVAGW

SEQ ID NO: 797 - protein, 9 aa, Artificial Sequence
  Description of Artificial Sequence: Synthetic peptide
EIVQGIGRA

SEQ ID NO: 798 - protein, 10 aa, Artificial Sequence
  Description of Artificial Sequence: Synthetic peptide
DNSDIKVVPR

SEQ ID NO: 799 - protein, 9 aa, Artificial Sequence
  Description of Artificial Sequence: Synthetic peptide
GIAPTTAKR

SEQ ID NO: 800 - protein, 9 aa, Artificial Sequence
  Description of Artificial Sequence: Synthetic peptide
ESVTINCTR

SEQ ID NO: 801 - protein, 9 aa, Artificial Sequence
  Description of Artificial Sequence: Synthetic peptide
IVGGHQAAM

SEQ ID NO: 802 - protein, 9 aa, Artificial Sequence
  Description of Artificial Sequence: Synthetic peptide
NITGLILTR

SEQ ID NO: 803 - protein, 9 aa, Artificial Sequence
  Description of Artificial Sequence: Synthetic peptide
LFNTVATLY

SEQ ID NO: 804 - protein, 9 aa, Artificial Sequence
  Description of Artificial Sequence: Synthetic peptide
TVLDVGDAY

SEQ ID NO: 805 - protein, 9 aa, Artificial Sequence
  Description of Artificial Sequence: Synthetic peptide
LYNTVATLY

SEQ ID NO: 806 - protein, 10 aa, Artificial Sequence
  Description of Artificial Sequence: Synthetic peptide
VVWTIVGIEY

SEQ ID NO: 807 - protein, 10 aa, Artificial Sequence
  Description of Artificial Sequence: Synthetic peptide
VTFEPIPIHY

SEQ ID NO: 808 - protein, 9 aa, Artificial Sequence
  Description of Artificial Sequence: Synthetic peptide
SFEPIPIHY

SEQ ID NO: 809 - protein, 9 aa, Artificial Sequence
  Description of Artificial Sequence: Synthetic peptide
TFEPIPIHY

SEQ ID NO: 810 - protein, 9 aa, Artificial Sequence
  Description of Artificial Sequence: Synthetic peptide
NSSKVSQNY

SEQ ID NO: 811 - protein, 10 aa, Artificial Sequence
  Description of Artificial Sequence: Synthetic peptide
FLNKGLGISY

SEQ ID NO: 812 - protein, 9 aa, Artificial Sequence
  Description of Artificial Sequence: Synthetic peptide
SSSKVSQNY

SEQ ID NO: 813 - protein, 10 aa, Artificial Sequence
  Description of Artificial Sequence: Synthetic peptide
SLYNTVATLY

SEQ ID NO: 814 - protein, 9 aa, Artificial Sequence
  Description of Artificial Sequence: Synthetic peptide
TTNQKTELY

SEQ ID NO: 815 - protein, 9 aa, Artificial Sequence
  Description of Artificial Sequence: Synthetic peptide
LFNTVATLY

SEQ ID NO: 816 - protein, 9 aa, Artificial Sequence
  Description of Artificial Sequence: Synthetic peptide
GFFPDWQNY

SEQ ID NO: 817 - protein, 9 aa, Artificial Sequence
  Description of Artificial Sequence: Synthetic peptide
LYNTVATLY

SEQ ID NO: 818 - protein, 9 aa, Artificial Sequence
  Description of Artificial Sequence: Synthetic peptide
GYFPDWQNY

SEQ ID NO: 819 - protein, 9 aa, Artificial Sequence
  Description of Artificial Sequence: Synthetic peptide
SFEPIPIHY

SEQ ID NO: 820 - protein, 10 aa, Artificial Sequence
  Description of Artificial Sequence: Synthetic peptide
VTFEPIPIHY

SEQ ID NO: 821 - protein, 9 aa, Artificial Sequence
  Description of Artificial Sequence: Synthetic peptide
TFEPIPIHY

SEQ ID NO: 822 - protein, 9 aa, Artificial Sequence
  Description of Artificial Sequence: Synthetic peptide
NSSKVSQNY

SEQ ID NO: 823 - protein, 10 aa, Artificial Sequence
  Description of Artificial Sequence: Synthetic peptide
VVWTIVGIEY

SEQ ID NO: 824 - protein, 9 aa, Artificial Sequence
  Description of Artificial Sequence: Synthetic peptide
LNKGLGISY

SEQ ID NO: 825 - protein, 9 aa, Artificial Sequence
  Description of Artificial Sequence: Synthetic peptide
SSSKVSQNY

SEQ ID NO: 826 - protein, 9 aa, Artificial Sequence
  Description of Artificial Sequence: Synthetic peptide
TVLDVGDAY

SEQ ID NO: 827 - protein, 9 aa, Artificial Sequence
  Description of Artificial Sequence: Synthetic peptide
KYLGNLLLY

SEQ ID NO: 828 - protein, 9 aa, Artificial Sequence
  Description of Artificial Sequence: Synthetic peptide
TTNQKTELY

SEQ ID NO: 829 - protein, 9 aa, Artificial Sequence
  Description of Artificial Sequence: Synthetic peptide
KTRPPLPSV

SEQ ID NO: 830 - protein, 9 aa, Artificial Sequence
  Description of Artificial Sequence: Synthetic peptide
HEVIFNSTL

SEQ ID NO: 831 - protein, 10 aa, Artificial Sequence
  Description of Artificial Sequence: Synthetic peptide
AERQGPEPTF

SEQ ID NO: 832 - protein, 9 aa, Artificial Sequence
  Description of Artificial Sequence: Synthetic peptide
AEVVQKVTM

SEQ ID NO: 833 - protein, 10 aa, Artificial Sequence
  Description of Artificial Sequence: Synthetic peptide
VETGVGRPQV

SEQ ID NO: 834 - protein, 9 aa, Artificial Sequence
  Description of Artificial Sequence: Synthetic peptide
YDLGDINNL

SEQ ID NO: 835 - protein, 10 aa, Artificial Sequence
  Description of Artificial Sequence: Synthetic peptide
KEQVPPLVSL

SEQ ID NO: 836 - protein, 10 aa, Artificial Sequence
  Description of Artificial Sequence: Synthetic peptide
AERQGTGPTF

SEQ ID NO: 837 - protein, 9 aa, Artificial Sequence
  Description of Artificial Sequence: Synthetic peptide
KIKPPLPSV

SEQ ID NO: 838 - protein, 9 aa, Artificial Sequence
  Description of Artificial Sequence: Synthetic peptide
AEVVQKVVM

SEQ ID NO: 839 - protein, 10 aa, Artificial Sequence
  Description of Artificial Sequence: Synthetic peptide
LTRDGGITSA

SEQ ID NO: 840 - protein, 9 aa, Artificial Sequence
  Description of Artificial Sequence: Synthetic peptide
YDLGNDINL

SEQ ID NO: 841 - protein, 10 aa, Artificial Sequence
  Description of Artificial Sequence: Synthetic peptide
AEGQGTGPTL

SEQ ID NO: 842 - protein, 9 aa, Artificial Sequence
  Description of Artificial Sequence: Synthetic peptide
RIKPPLPSV

SEQ ID NO: 843 - protein, 9 aa, Artificial Sequence
  Description of Artificial Sequence: Synthetic peptide
SSSKVSQNY

SEQ ID NO: 844 - protein, 9 aa, Artificial Sequence
  Description of Artificial Sequence: Synthetic peptide
TTNQKTELY

SEQ ID NO: 845 - protein, 10 aa, Artificial Sequence
  Description of Artificial Sequence: Synthetic peptide
ILKDPVHGAY

SEQ ID NO: 846 - protein, 9 aa, Artificial Sequence
  Description of Artificial Sequence: Synthetic peptide
RVMGIERNY

SEQ ID NO: 847 - protein, 9 aa, Artificial Sequence
  Description of Artificial Sequence: Synthetic peptide
NSSKVSQNY

SEQ ID NO: 848 - protein, 9 aa, Artificial Sequence
  Description of Artificial Sequence: Synthetic peptide
GTEELRSLY

SEQ ID NO: 849 - protein, 10 aa, Artificial Sequence
  Description of Artificial Sequence: Synthetic peptide
GSSSKVSQNY

SEQ ID NO: 850 - protein, 9 aa, Artificial Sequence
  Description of Artificial Sequence: Synthetic peptide
TVLDVGDAY

SEQ ID NO: 851 - protein, 11 aa, Artificial Sequence
  Description of Artificial Sequence: Synthetic peptide
IGNSSKVSQNY

SEQ ID NO: 852 - protein, 11 aa, Artificial Sequence
  Description of Artificial Sequence: Synthetic peptide
STNNETPGTRY

SEQ ID NO: 853 - protein, 9 aa, Artificial Sequence
  Description of Artificial Sequence: Synthetic peptide
KAQEEHERY

SEQ ID NO: 854 - protein, 10 aa, Artificial Sequence
  Description of Artificial Sequence: Synthetic peptide
ILKEPVHGVY

SEQ ID NO: 855 - protein, 10 aa, Artificial Sequence
  Description of Artificial Sequence: Synthetic peptide
VQNAQGQMIY

SEQ ID NO: 856 - protein, 8 aa, Artificial Sequence
  Description of Artificial Sequence: Synthetic peptide
GQQIYNTY

SEQ ID NO: 857 - protein, 10 aa, Artificial Sequence
  Description of Artificial Sequence: Synthetic peptide
SSNNSNSNEY

SEQ ID NO: 858 - protein, 9 aa, Artificial Sequence
  Description of Artificial Sequence: Synthetic peptide
SSSKVSQNY

SEQ ID NO: 859 - protein, 9 aa, Artificial Sequence
  Description of Artificial Sequence: Synthetic peptide
TTNQKTELY

SEQ ID NO: 860 - protein, 9 aa, Artificial Sequence
  Description of Artificial Sequence: Synthetic peptide
RVMGIERNY

SEQ ID NO: 861 - protein, 9 aa, Artificial Sequence
  Description of Artificial Sequence: Synthetic peptide
GTEELRSLY

SEQ ID NO: 862 - protein, 10 aa, Artificial Sequence
  Description of Artificial Sequence: Synthetic peptide
FLNKGLGISY

SEQ ID NO: 863 - protein, 9 aa, Artificial Sequence
  Description of Artificial Sequence: Synthetic peptide
RIGPGQTFY

SEQ ID NO: 864 - protein, 9 aa, Artificial Sequence
  Description of Artificial Sequence: Synthetic peptide
NSSKVSQNY

SEQ ID NO: 865 - protein, 9 aa, Artificial Sequence
  Description of Artificial Sequence: Synthetic peptide
ITNSSVNMR

SEQ ID NO: 866 - protein, 9 aa, Artificial Sequence
  Description of Artificial Sequence: Synthetic peptide
QSNPYPKPR

SEQ ID NO: 867 - protein, 10 aa, Artificial Sequence
  Description of Artificial Sequence: Synthetic peptide
AQQTSIMMQR

SEQ ID NO: 868 - protein, 9 aa, Artificial Sequence
  Description of Artificial Sequence: Synthetic peptide
QQTSIMMQR

SEQ ID NO: 869 - protein, 11 aa, Artificial Sequence
  Description of Artificial Sequence: Synthetic peptide
RVIEIVQGIGR

SEQ ID NO: 870 - protein, 10 aa, Artificial Sequence
  Description of Artificial Sequence: Synthetic peptide
KTRPPLPSVR

SEQ ID NO: 871 - protein, 9 aa, Artificial Sequence
  Description of Artificial Sequence: Synthetic peptide
SYNVTTVLR

SEQ ID NO: 872 - protein, 11 aa, Artificial Sequence
  Description of Artificial Sequence: Synthetic peptide
RLRDLLSIVTR

SEQ ID NO: 873 - protein, 11 aa, Artificial Sequence
  Description of Artificial Sequence: Synthetic peptide
RVIEIGQGICR

SEQ ID NO: 874 - protein, 11 aa, Artificial Sequence
  Description of Artificial Sequence: Synthetic peptide
RQRQIDTLSER

SEQ ID NO: 875 - protein, 11 aa, Artificial Sequence
  Description of Artificial Sequence: Synthetic peptide
RQRQIDSISER

SEQ ID NO: 876 - protein, 9 aa, Artificial Sequence
  Description of Artificial Sequence: Synthetic peptide
RTNSPTSSR

SEQ ID NO: 877 - protein, 9 aa, Artificial Sequence
  Description of Artificial Sequence: Synthetic peptide
RQIDTLSER

SEQ ID NO: 878 - protein, 9 aa, Artificial Sequence
  Description of Artificial Sequence: Synthetic peptide
RQIDSISER

SEQ ID NO: 879 - protein, 10 aa, Artificial Sequence
  Description of Artificial Sequence: Synthetic peptide
VQHPNIMMQR

SEQ ID NO: 880 - protein, 11 aa, Artificial Sequence
  Description of Artificial Sequence: Synthetic peptide
QSQGVETGVGR

SEQ ID NO: 881 - protein, 9 aa, Artificial Sequence
  Description of Artificial Sequence: Synthetic peptide
ATLYCVHQR

SEQ ID NO: 882 - protein, 9 aa, Artificial Sequence
  Description of Artificial Sequence: Synthetic peptide
KQIINMWQR

SEQ ID NO: 883 - protein, 11 aa, Artificial Sequence
  Description of Artificial Sequence: Synthetic peptide
RVIETVQRLGR

SEQ ID NO: 884 - protein, 10 aa, Artificial Sequence
  Description of Artificial Sequence: Synthetic peptide
KIKPPLPSVR

SEQ ID NO: 885 - protein, 11 aa, Artificial Sequence
  Description of Artificial Sequence: Synthetic peptide
TVNDIQKLVGK

SEQ ID NO: 886 - protein, 11 aa, Artificial Sequence
  Description of Artificial Sequence: Synthetic peptide
QVQHPNIMMQR

SEQ ID NO: 887 - protein, 9 aa, Artificial Sequence
  Description of Artificial Sequence: Synthetic peptide
KGLGISYGR

SEQ ID NO: 888 - protein, 10 aa, Artificial Sequence
  Description of Artificial Sequence: Synthetic peptide
QVRDQAEHLR

SEQ ID NO: 889 - protein, 9 aa, Artificial Sequence
  Description of Artificial Sequence: Synthetic peptide
SYNITTELR

SEQ ID NO: 890 - protein, 11 aa, Artificial Sequence
  Description of Artificial Sequence: Synthetic peptide
QVQHTNIMMQR

SEQ ID NO: 891 - protein, 9 aa, Artificial Sequence
  Description of Artificial Sequence: Synthetic peptide
ILRQVVSPR

SEQ ID NO: 892 - protein, 9 aa, Artificial Sequence
  Description of Artificial Sequence: Synthetic peptide
YDLGDINNL

SEQ ID NO: 893 - protein, 11 aa, Artificial Sequence
  Description of Artificial Sequence: Synthetic peptide
VGPTPVNIIGR

SEQ ID NO: 894 - protein, 9 aa, Artificial Sequence
  Description of Artificial Sequence: Synthetic peptide
SYRHHFESR

SEQ ID NO: 895 - protein, 11 aa, Artificial Sequence
  Description of Artificial Sequence: Synthetic peptide
KTLHQVVEQLR

SEQ ID NO: 896 - protein, 9 aa, Artificial Sequence
  Description of Artificial Sequence: Synthetic peptide
VINRVRQGY

SEQ ID NO: 897 - protein, 10 aa, Artificial Sequence
  Description of Artificial Sequence: Synthetic peptide
SVINRVRQGY

SEQ ID NO: 898 - protein, 9 aa, Artificial Sequence
  Description of Artificial Sequence: Synthetic peptide
IISRVRQGY

SEQ ID NO: 899 - protein, 9 aa, Artificial Sequence
  Description of Artificial Sequence: Synthetic peptide
IINRVRQGY

SEQ ID NO: 900 - protein, 11 aa, Artificial Sequence
  Description of Artificial Sequence: Synthetic peptide
DSLPSEAGAER

SEQ ID NO: 901 - protein, 11 aa, Artificial Sequence
  Description of Artificial Sequence: Synthetic peptide
ETFYVDGAANR

SEQ ID NO: 902 - protein, 10 aa, Artificial Sequence
  Description of Artificial Sequence: Synthetic peptide
DNSDIKVVPR

SEQ ID NO: 903 - protein, 9 aa, Artificial Sequence
  Description of Artificial Sequence: Synthetic peptide
SYNVTTVLR

SEQ ID NO: 904 - protein, 10 aa, Artificial Sequence
  Description of Artificial Sequence: Synthetic peptide
DIIATDIQTR

SEQ ID NO: 905 - protein, 9 aa, Artificial Sequence
  Description of Artificial Sequence: Synthetic peptide
SYRHHFESR

SEQ ID NO: 906 - protein, 11 aa, Artificial Sequence
  Description of Artificial Sequence: Synthetic peptide
DVKQGPKEPFR

SEQ ID NO: 907 - protein, 9 aa, Artificial Sequence
  Description of Artificial Sequence: Synthetic peptide
DSRLALKHR

SEQ ID NO: 908 - protein, 11 aa, Artificial Sequence
  Description of Artificial Sequence: Synthetic peptide
DSKLALKHVAR

SEQ ID NO: 909 - protein, 10 aa, Artificial Sequence
  Description of Artificial Sequence: Synthetic peptide
DCFSDSAIRR

SEQ ID NO: 910 - protein, 11 aa, Artificial Sequence
  Description of Artificial Sequence: Synthetic peptide
ENLAFQQGEAR

SEQ ID NO: 911 - protein, 9 aa, Artificial Sequence
  Description of Artificial Sequence: Synthetic peptide
DAWEKIRLR

SEQ ID NO: 912 - protein, 11 aa, Artificial Sequence
  Description of Artificial Sequence: Synthetic peptide
EARKFSSEQTR

SEQ ID NO: 913 - protein, 9 aa, Artificial Sequence
  Description of Artificial Sequence: Synthetic peptide
QARVLAVER

SEQ ID NO: 914 - protein, 9 aa, Artificial Sequence
  Description of Artificial Sequence: Synthetic peptide
SYNITTELR

SEQ ID NO: 915 - protein, 11 aa, Artificial Sequence
  Description of Artificial Sequence: Synthetic peptide
DIRQGPKESFR

SEQ ID NO: 916 - protein, 9 aa, Artificial Sequence
  Description of Artificial Sequence: Synthetic peptide
EYKKLLKQR

SEQ ID NO: 917 - protein, 9 aa, Artificial Sequence
  Description of Artificial Sequence: Synthetic peptide
NITGLILTR

SEQ ID NO: 918 - protein, 11 aa, Artificial Sequence
  Description of Artificial Sequence: Synthetic peptide
EPLGVAPTKAR

SEQ ID NO: 919 - protein, 9 aa, Artificial Sequence
  Description of Artificial Sequence: Synthetic peptide
DAKAYETEK

SEQ ID NO: 920 - protein, 9 aa, Artificial Sequence
  Description of Artificial Sequence: Synthetic peptide
QSNPYPKPR

SEQ ID NO: 921 - protein, 11 aa, Artificial Sequence
  Description of Artificial Sequence: Synthetic peptide
ETFYVDGAANR

SEQ ID NO: 922 - protein, 9 aa, Artificial Sequence
  Description of Artificial Sequence: Synthetic peptide
ESVTINCTR

SEQ ID NO: 923 - protein, 9 aa, Artificial Sequence
  Description of Artificial Sequence: Synthetic peptide
SYNVTTVLR

SEQ ID NO: 924 - protein, 9 aa, Artificial Sequence
  Description of Artificial Sequence: Synthetic peptide
ITNSSVNMR

SEQ ID NO: 925 - protein, 9 aa, Artificial Sequence
  Description of Artificial Sequence: Synthetic peptide
EYKKLLKQR

SEQ ID NO: 926 - protein, 9 aa, Artificial Sequence
  Description of Artificial Sequence: Synthetic peptide
QSNPYPKPR

SEQ ID NO: 927 - protein, 10 aa, Artificial Sequence
  Description of Artificial Sequence: Synthetic peptide
DNSDIKVVPR

SEQ ID NO: 928 - protein, 9 aa, Artificial Sequence
  Description of Artificial Sequence: Synthetic peptide
QARVLAVER

SEQ ID NO: 929 - protein, 11 aa, Artificial Sequence
  Description of Artificial Sequence: Synthetic peptide
EPLGVAPTKAR

SEQ ID NO: 930 - protein, 9 aa, Artificial Sequence
  Description of Artificial Sequence: Synthetic peptide
SYNITTELR

SEQ ID NO: 931 - protein, 9 aa, Artificial Sequence
  Description of Artificial Sequence: Synthetic peptide
FYVDGAANR

SEQ ID NO: 932 - protein, 11 aa, Artificial Sequence
  Description of Artificial Sequence: Synthetic peptide
EPLGVAPTRAR

SEQ ID NO: 933 - protein, 11 aa, Artificial Sequence
  Description of Artificial Sequence: Synthetic peptide
TVNDIQKLVGK

SEQ ID NO: 934 - protein, 11 aa, Artificial Sequence
  Description of Artificial Sequence: Synthetic peptide
EARKFSSEQTR

SEQ ID NO: 935 - protein, 11 aa, Artificial Sequence
  Description of Artificial Sequence: Synthetic peptide
DSLPSEAGAER

SEQ ID NO: 936 - protein, 11 aa, Artificial Sequence
  Description of Artificial Sequence: Synthetic peptide
ESNITGLILTR

SEQ ID NO: 937 - protein, 9 aa, Artificial Sequence
  Description of Artificial Sequence: Synthetic peptide
NSDIKVVPR

SEQ ID NO: 938 - protein, 8 aa, Artificial Sequence
  Description of Artificial Sequence: Synthetic peptide
MTLTVQAR

SEQ ID NO: 939 - protein, 10 aa, Artificial Sequence
  Description of Artificial Sequence: Synthetic peptide
EVHIPIGDAR

SEQ ID NO: 940 - protein, 11 aa, Artificial Sequence
  Description of Artificial Sequence: Synthetic peptide
QAQQTSIMMQR

SEQ ID NO: 941 - protein, 8 aa, Artificial Sequence
  Description of Artificial Sequence: Synthetic peptide
NTSELFNR

SEQ ID NO: 942 - protein, 8 aa, Artificial Sequence
  Description of Artificial Sequence: Synthetic peptide
ENLAFQQR

SEQ ID NO: 943 - protein, 10 aa, Artificial Sequence
  Description of Artificial Sequence: Synthetic peptide
ELKKIIGQVR

SEQ ID NO: 944 - protein, 8 aa, Artificial Sequence
  Description of Artificial Sequence: Synthetic peptide
HTNIMMQR

SEQ ID NO: 945 - protein, 9 aa, Artificial Sequence
  Description of Artificial Sequence: Synthetic peptide
IRQTPTAAR

SEQ ID NO: 946 - protein, 9 aa, Artificial Sequence
  Description of Artificial Sequence: Synthetic peptide
NITGLILTR

SEQ ID NO: 947 - protein, 11 aa, Artificial Sequence
  Description of Artificial Sequence: Synthetic peptide
ETFRPGGGDMR

SEQ ID NO: 948 - protein, 10 aa, Artificial Sequence
  Description of Artificial Sequence: Synthetic peptide
QVRDQAEHLR

SEQ ID NO: 949 - protein, 11 aa, Artificial Sequence
  Description of Artificial Sequence: Synthetic peptide
QSQGVETGVGR

SEQ ID NO: 950 - protein, 10 aa, Artificial Sequence
  Description of Artificial Sequence: Synthetic peptide
DIIATDIQTR

SEQ ID NO: 951 - protein, 9 aa, Artificial Sequence
  Description of Artificial Sequence: Synthetic peptide
FNLPPIVAK

SEQ ID NO: 952 - protein, 10 aa, Artificial Sequence
  Description of Artificial Sequence: Synthetic peptide
SFQTHTPNPR

SEQ ID NO: 953 - protein, 9 aa, Artificial Sequence
  Description of Artificial Sequence: Synthetic peptide
QQTSIMMQR

SEQ ID NO: 954 - protein, 9 aa, Artificial Sequence
  Description of Artificial Sequence: Synthetic peptide
MIHQSLSPR

SEQ ID NO: 955 - protein, 10 aa, Artificial Sequence
  Description of Artificial Sequence: Synthetic peptide
SNITGLILTR

SEQ ID NO: 956 - protein, 11 aa, Artificial Sequence
  Description of Artificial Sequence: Synthetic peptide
ETFYVDGAANR

SEQ ID NO: 957 - protein, 9 aa, Artificial Sequence
  Description of Artificial Sequence: Synthetic peptide
ESVTINCTR

SEQ ID NO: 958 - protein, 10 aa, Artificial Sequence
  Description of Artificial Sequence: Synthetic peptide
DIIATDIQTR

SEQ ID NO: 959 - protein, 10 aa, Artificial Sequence
  Description of Artificial Sequence: Synthetic peptide
DNSDIKVVPR

SEQ ID NO: 960 - protein, 9 aa, Artificial Sequence
  Description of Artificial Sequence: Synthetic peptide
NITGLILTR

SEQ ID NO: 961 - protein, 10 aa, Artificial Sequence
  Description of Artificial Sequence: Synthetic peptide
DCFSDSAIRR

SEQ ID NO: 962 - protein, 11 aa, Artificial Sequence
  Description of Artificial Sequence: Synthetic peptide
QSQGVETGVGR

SEQ ID NO: 963 - protein, 11 aa, Artificial Sequence
  Description of Artificial Sequence: Synthetic peptide
TVNDIQKLVGK

SEQ ID NO: 964 - protein, 11 aa, Artificial Sequence
  Description of Artificial Sequence: Synthetic peptide
ETFRPGGGDMR

SEQ ID NO: 965 - protein, 9 aa, Artificial Sequence
  Description of Artificial Sequence: Synthetic peptide
ITNSSVNMR

SEQ ID NO: 966 - protein, 11 aa, Artificial Sequence
  Description of Artificial Sequence: Synthetic peptide
NSITNSSVNMR

SEQ ID NO: 967 - protein, 9 aa, Artificial Sequence
  Description of Artificial Sequence: Synthetic peptide
ELVSQIIEK

SEQ ID NO: 968 - protein, 11 aa, Artificial Sequence
  Description of Artificial Sequence: Synthetic peptide
DSLPSEAGAER

SEQ ID NO: 969 - protein, 11 aa, Artificial Sequence
  Description of Artificial Sequence: Synthetic peptide
QAQQTSIMMQR

SEQ ID NO: 970 - protein, 9 aa, Artificial Sequence
  Description of Artificial Sequence: Synthetic peptide
QQTSIMMQR

SEQ ID NO: 971 - protein, 9 aa, Artificial Sequence
  Description of Artificial Sequence: Synthetic peptide
ELVNQIIEK

SEQ ID NO: 972 - protein, 11 aa, Artificial Sequence
  Description of Artificial Sequence: Synthetic peptide
ESNITGLILTR

SEQ ID NO: 973 - protein, 11 aa, Artificial Sequence
  Description of Artificial Sequence: Synthetic peptide
RVIEIVQGIGR

SEQ ID NO: 974 - protein, 10 aa, Artificial Sequence
  Description of Artificial Sequence: Synthetic peptide
EVNIVTDSQY

SEQ ID NO: 975 - protein, 9 aa, Artificial Sequence
  Description of Artificial Sequence: Synthetic peptide
EPLGVAPTR

SEQ ID NO: 976 - protein, 10 aa, Artificial Sequence
  Description of Artificial Sequence: Synthetic peptide
EPAQPLVSLK

SEQ ID NO: 977 - protein, 9 aa, Artificial Sequence
  Description of Artificial Sequence: Synthetic peptide
NSDIKVVPR

SEQ ID NO: 978 - protein, 10 aa, Artificial Sequence
  Description of Artificial Sequence: Synthetic peptide
ASITLTVQAR

SEQ ID NO: 979 - protein, 10 aa, Artificial Sequence
  Description of Artificial Sequence: Synthetic peptide
NTIEMKEEVR

SEQ ID NO: 980 - protein, 11 aa, Artificial Sequence
  Description of Artificial Sequence: Synthetic peptide
ESELVSQIIEK

SEQ ID NO: 981 - protein, 9 aa, Artificial Sequence
  Description of Artificial Sequence: Synthetic peptide
IIATDIQTR

SEQ ID NO: 982 - protein, 11 aa, Artificial Sequence
  Description of Artificial Sequence: Synthetic peptide
TAAEGVGAVSK

SEQ ID NO: 983 - protein, 10 aa, Artificial Sequence
  Description of Artificial Sequence: Synthetic peptide
ATGDIIGDIR

SEQ ID NO: 984 - protein, 10 aa, Artificial Sequence
  Description of Artificial Sequence: Synthetic peptide
ATGEIIGDIR

SEQ ID NO: 985 - protein, 9 aa, Artificial Sequence
  Description of Artificial Sequence: Synthetic peptide
QGVETGVGR

SEQ ID NO: 986 - protein, 9 aa, Artificial Sequence
  Description of Artificial Sequence: Synthetic peptide
NITGLLLTR

SEQ ID NO: 987 - protein, 9 aa, Artificial Sequence
  Description of Artificial Sequence: Synthetic peptide
GIAPTTAKR

SEQ ID NO: 988 - protein, 11 aa, Artificial Sequence
  Description of Artificial Sequence: Synthetic peptide
QSQGTETGVGR

SEQ ID NO: 989 - protein, 10 aa, Artificial Sequence
  Description of Artificial Sequence: Synthetic peptide
DIIATDIQTK

SEQ ID NO: 990 - protein, 10 aa, Artificial Sequence
  Description of Artificial Sequence: Synthetic peptide
DTIAIVVAGW

SEQ ID NO: 991 - protein, 10 aa, Artificial Sequence
  Description of Artificial Sequence: Synthetic peptide
SNITGLILTR

SEQ ID NO: 992 - protein, 10 aa, Artificial Sequence
  Description of Artificial Sequence: Synthetic peptide
ASMTLTVQAR

SEQ ID NO: 993 - protein, 9 aa, Artificial Sequence
  Description of Artificial Sequence: Synthetic peptide
TPAGYAILK

SEQ ID NO: 994 - protein, 11 aa, Artificial Sequence
  Description of Artificial Sequence: Synthetic peptide
VGPTPVNIIGR

SEQ ID NO: 995 - protein, 10 aa, Artificial Sequence
  Description of Artificial Sequence: Synthetic peptide
ESWTVNDIQK

SEQ ID NO: 996 - protein, 9 aa, Artificial Sequence
  Description of Artificial Sequence: Synthetic peptide
FAVLSVINR

SEQ ID NO: 997 - protein, 10 aa, Artificial Sequence
  Description of Artificial Sequence: Synthetic peptide
QTGAISPTSR

SEQ ID NO: 998 - protein, 9 aa, Artificial Sequence
  Description of Artificial Sequence: Synthetic peptide
ETAYFLLKL

SEQ ID NO: 999 - protein, 9 aa, Artificial Sequence
  Description of Artificial Sequence: Synthetic peptide
LVSQIIEKL

SEQ ID NO: 1000 - protein, 9 aa, Artificial Sequence
  Description of Artificial Sequence: Synthetic peptide
QLAEVVQKV

SEQ ID NO: 1001 - protein, 9 aa, Artificial Sequence
  Description of Artificial Sequence: Synthetic peptide
NTSAITQAC

SEQ ID NO: 1002 - protein, 9 aa, Artificial Sequence
  Description of Artificial Sequence: Synthetic peptide
EISNYTIKI

SEQ ID NO: 1003 - protein, 9 aa, Artificial Sequence
  Description of Artificial Sequence: Synthetic peptide
NTSTITQAC

SEQ ID NO: 1004 - protein, 9 aa, Artificial Sequence
  Description of Artificial Sequence: Synthetic peptide
NTIEMKEEV

SEQ ID NO: 1005 - protein, 9 aa, Artificial Sequence
  Description of Artificial Sequence: Synthetic peptide
TVNDIQKLV

SEQ ID NO: 1006 - protein, 9 aa, Artificial Sequence
  Description of Artificial Sequence: Synthetic peptide
EIFGIGEEI

SEQ ID NO: 1007 - protein, 9 aa, Artificial Sequence
  Description of Artificial Sequence: Synthetic peptide
NVKTIIVQL

SEQ ID NO: 1008 - protein, 9 aa, Artificial Sequence
  Description of Artificial Sequence: Synthetic peptide
NVKNIIVQL

SEQ ID NO: 1009 - protein, 9 aa, Artificial Sequence
  Description of Artificial Sequence: Synthetic peptide
YTIKIYELI

SEQ ID NO: 1010 - protein, 9 aa, Artificial Sequence
  Description of Artificial Sequence: Synthetic peptide
EVTTHSFNC

SEQ ID NO: 1011 - protein, 9 aa, Artificial Sequence
  Description of Artificial Sequence: Synthetic peptide
RVIEIVQGI

SEQ ID NO: 1012 - protein, 10 aa, Artificial Sequence
  Description of Artificial Sequence: Synthetic peptide
NTAENLWVTV

SEQ ID NO: 1013 - protein, 9 aa, Artificial Sequence
  Description of Artificial Sequence: Synthetic peptide
ETIILPCRI

SEQ ID NO: 1014 - protein, 9 aa, Artificial Sequence
  Description of Artificial Sequence: Synthetic peptide
NTVATLYCV

SEQ ID NO: 1015 - protein, 9 aa, Artificial Sequence
  Description of Artificial Sequence: Synthetic peptide
GAASITLTV

SEQ ID NO: 1016 - protein, 9 aa, Artificial Sequence
  Description of Artificial Sequence: Synthetic peptide
EVIPMFSAL

SEQ ID NO: 1017 - protein, 9 aa, Artificial Sequence
  Description of Artificial Sequence: Synthetic peptide
EISNYTNLI

SEQ ID NO: 1018 - protein, 9 aa, Artificial Sequence
  Description of Artificial Sequence: Synthetic peptide
DTITLQCRI

SEQ ID NO: 1019 - protein, 9 aa, Artificial Sequence
  Description of Artificial Sequence: Synthetic peptide
AVLSIINRV

SEQ ID NO: 1020 - protein, 9 aa, Artificial Sequence
  Description of Artificial Sequence: Synthetic peptide
RVIETVQRL

SEQ ID NO: 1021 - protein, 9 aa, Artificial Sequence
  Description of Artificial Sequence: Synthetic peptide
AVLSIISRV

SEQ ID NO: 1022 - protein, 11 aa, Artificial Sequence
  Description of Artificial Sequence: Synthetic peptide
EVNIVTDSQYV

SEQ ID NO: 1023 - protein, 11 aa, Artificial Sequence
  Description of Artificial Sequence: Synthetic peptide
ETFYVDGAANR

SEQ ID NO: 1024 - protein, 9 aa, Artificial Sequence
  Description of Artificial Sequence: Synthetic peptide
EALDKIEEI

SEQ ID NO: 1025 - protein, 9 aa, Artificial Sequence
  Description of Artificial Sequence: Synthetic peptide
AAVDLSHFL

SEQ ID NO: 1026 - protein, 9 aa, Artificial Sequence
  Description of Artificial Sequence: Synthetic peptide
MTSNPPIPV

SEQ ID NO: 1027 - protein, 9 aa, Artificial Sequence
  Description of Artificial Sequence: Synthetic peptide
LVNQIIEKL

SEQ ID NO: 1028 - protein, 9 aa, Artificial Sequence
  Description of Artificial Sequence: Synthetic peptide
AVLSVINRV

SEQ ID NO: 1029 - protein, 9 aa, Artificial Sequence
  Description of Artificial Sequence: Synthetic peptide
MTGNPPIPV

SEQ ID NO: 1030 - protein, 11 aa, Artificial Sequence
  Description of Artificial Sequence: Synthetic peptide
EVVQKVVMESI

SEQ ID NO: 1031 - protein, 9 aa, Artificial Sequence
  Description of Artificial Sequence: Synthetic peptide
EIFGMREEI

SEQ ID NO: 1032 - protein, 11 aa, Artificial Sequence
  Description of Artificial Sequence: Synthetic peptide
ESSNPKVSSEV

SEQ ID NO: 1033 - protein, 10 aa, Artificial Sequence
  Description of Artificial Sequence: Synthetic peptide
RPNNNTRTSI

SEQ ID NO: 1034 - protein, 9 aa, Artificial Sequence
  Description of Artificial Sequence: Synthetic peptide
SPAIFQSSM

SEQ ID NO: 1035 - protein, 10 aa, Artificial Sequence
  Description of Artificial Sequence: Synthetic peptide
SVRIGPGQTF

SEQ ID NO: 1036 - protein, 10 aa, Artificial Sequence
  Description of Artificial Sequence: Synthetic peptide
RPNNNTRKSV

SEQ ID NO: 1037 - protein, 10 aa, Artificial Sequence
  Description of Artificial Sequence: Synthetic peptide
SIRIGPGQSF

SEQ ID NO: 1038 - protein, 10 aa, Artificial Sequence
  Description of Artificial Sequence: Synthetic peptide
RPNNNTRRSV

SEQ ID NO: 1039 - protein, 9 aa, Artificial Sequence
  Description of Artificial Sequence: Synthetic peptide
SPAIFQASM

SEQ ID NO: 1040 - protein, 9 aa, Artificial Sequence
  Description of Artificial Sequence: Synthetic peptide
GPSHKARVL

SEQ ID NO: 1041 - protein, 10 aa, Artificial Sequence
  Description of Artificial Sequence: Synthetic peptide
RPAEPVPLQL

SEQ ID NO: 1042 - protein, 8 aa, Artificial Sequence
  Description of Artificial Sequence: Synthetic peptide
KPVVTTQL

SEQ ID NO: 1043 - protein, 8 aa, Artificial Sequence
  Description of Artificial Sequence: Synthetic peptide
KPVVSTQL

SEQ ID NO: 1044 - protein, 8 aa, Artificial Sequence
  Description of Artificial Sequence: Synthetic peptide
RPVVSTQL

SEQ ID NO: 1045 - protein, 10 aa, Artificial Sequence
  Description of Artificial Sequence: Synthetic peptide
SPIETVPVKL

SEQ ID NO: 1046 - protein, 10 aa, Artificial Sequence
  Description of Artificial Sequence: Synthetic peptide
SPISTVPVKL

SEQ ID NO: 1047 - protein, 10 aa, Artificial Sequence
  Description of Artificial Sequence: Synthetic peptide
VPTDPSPQEL

SEQ ID NO: 1048 - protein, 10 aa, Artificial Sequence
  Description of Artificial Sequence: Synthetic peptide
SPAATGVGAV

SEQ ID NO: 1049 - protein, 9 aa, Artificial Sequence
  Description of Artificial Sequence: Synthetic peptide
EPAQPLVSL

SEQ ID NO: 1050 - protein, 9 aa, Artificial Sequence
  Description of Artificial Sequence: Synthetic peptide
ALRTGTEEL

SEQ ID NO: 1051 - protein, 8 aa, Artificial Sequence
  Description of Artificial Sequence: Synthetic peptide
EVVQKVVM

SEQ ID NO: 1052 - protein, 8 aa, Artificial Sequence
  Description of Artificial Sequence: Synthetic peptide
EVVQKVTM

SEQ ID NO: 1053 - protein, 9 aa, Artificial Sequence
  Description of Artificial Sequence: Synthetic peptide
ESYLRDQQL

SEQ ID NO: 1054 - protein, 9 aa, Artificial Sequence
  Description of Artificial Sequence: Synthetic peptide
QLQARVLAL

SEQ ID NO: 1055 - protein, 8 aa, Artificial Sequence
  Description of Artificial Sequence: Synthetic peptide
ELLGHSSL

SEQ ID NO: 1056 - protein, 9 aa, Artificial Sequence
  Description of Artificial Sequence: Synthetic peptide
YPGIKVKQL

SEQ ID NO: 1057 - protein, 9 aa, Artificial Sequence
  Description of Artificial Sequence: Synthetic peptide
TLSERVLST

SEQ ID NO: 1058 - protein, 9 aa, Artificial Sequence
  Description of Artificial Sequence: Synthetic peptide
SIVTRTVEL

SEQ ID NO: 1059 - protein, 9 aa, Artificial Sequence
  Description of Artificial Sequence: Synthetic peptide
DVKDTKEAL

SEQ ID NO: 1060 - protein, 9 aa, Artificial Sequence
  Description of Artificial Sequence: Synthetic peptide
SISERVLSA

SEQ ID NO: 1061 - protein, 9 aa, Artificial Sequence
  Description of Artificial Sequence: Synthetic peptide
DSAIRKAIL

SEQ ID NO: 1062 - protein, 9 aa, Artificial Sequence
  Description of Artificial Sequence: Synthetic peptide
ELRISATSL

SEQ ID NO: 1063 - protein, 8 aa, Artificial Sequence
  Description of Artificial Sequence: Synthetic peptide
TTNQKTEL

SEQ ID NO: 1064 - protein, 8 aa, Artificial Sequence
  Description of Artificial Sequence: Synthetic peptide
HLKTAVQM

SEQ ID NO: 1065 - protein, 9 aa, Artificial Sequence
  Description of Artificial Sequence: Synthetic peptide
ELKSLFNTV

SEQ ID NO: 1066 - protein, 9 aa, Artificial Sequence
  Description of Artificial Sequence: Synthetic peptide
TGHNKVGSL

SEQ ID NO: 1067 - protein, 11 aa, Artificial Sequence
  Description of Artificial Sequence: Synthetic peptide
TQIDPDLADQL

SEQ ID NO: 1068 - protein, 11 aa, Artificial Sequence
  Description of Artificial Sequence: Synthetic peptide
TQIDPDQADQL

SEQ ID NO: 1069 - protein, 9 aa, Artificial Sequence
  Description of Artificial Sequence: Synthetic peptide
AQEEGEVGF

SEQ ID NO: 1070 - protein, 9 aa, Artificial Sequence
  Description of Artificial Sequence: Synthetic peptide
GQDQWTYQI

SEQ ID NO: 1071 - protein, 9 aa, Artificial Sequence
  Description of Artificial Sequence: Synthetic peptide
KMENVTEEF

SEQ ID NO: 1072 - protein, 9 aa, Artificial Sequence
  Description of Artificial Sequence: Synthetic peptide
RVIEIGQGI

SEQ ID NO: 1073 - protein, 9 aa, Artificial Sequence
  Description of Artificial Sequence: Synthetic peptide
IQKQGQDQW

SEQ ID NO: 1074 - protein, 10 aa, Artificial Sequence
  Description of Artificial Sequence: Synthetic peptide
GQVRDQAEHL

SEQ ID NO: 1075 - protein, 10 aa, Artificial Sequence
  Description of Artificial Sequence: Synthetic peptide
RQIDSISERI

SEQ ID NO: 1076 - protein, 9 aa, Artificial Sequence
  Description of Artificial Sequence: Synthetic peptide
GITSANETF

SEQ ID NO: 1077 - protein, 9 aa, Artificial Sequence
  Description of Artificial Sequence: Synthetic peptide
AQEEEEVGF

SEQ ID NO: 1078 - protein, 9 aa, Artificial Sequence
  Description of Artificial Sequence: Synthetic peptide
AQEDDEVGF

SEQ ID NO: 1079 - protein, 10 aa, Artificial Sequence
  Description of Artificial Sequence: Synthetic peptide
GVNSSDSETF

SEQ ID NO: 1080 - protein, 8 aa, Artificial Sequence
  Description of Artificial Sequence: Synthetic peptide
RQGPEPTF

SEQ ID NO: 1081 - protein, 9 aa, Artificial Sequence
  Description of Artificial Sequence: Synthetic peptide
QLAEVVQKV

SEQ ID NO: 1082 - protein, 9 aa, Artificial Sequence
  Description of Artificial Sequence: Synthetic peptide
GAASITLTV

SEQ ID NO: 1083 - protein, 9 aa, Artificial Sequence
  Description of Artificial Sequence: Synthetic peptide
SQIYAGIKV

SEQ ID NO: 1084 - protein, 9 aa, Artificial Sequence
  Description of Artificial Sequence: Synthetic peptide
SQIYPGIKV

SEQ ID NO: 1085 - protein, 9 aa, Artificial Sequence
  Description of Artificial Sequence: Synthetic peptide
GQVDCSPGI

SEQ ID NO: 1086 - protein, 9 aa, Artificial Sequence
  Description of Artificial Sequence: Synthetic peptide
GAASMTLTV

SEQ ID NO: 1087 - protein, 8 aa, Artificial Sequence
  Description of Artificial Sequence: Synthetic peptide
SQVQHPNI

SEQ ID NO: 1088 - protein, 9 aa, Artificial Sequence
  Description of Artificial Sequence: Synthetic peptide
GQDQWTYQI

SEQ ID NO: 1089 - protein, 9 aa, Artificial Sequence
  Description of Artificial Sequence: Synthetic peptide
VQKVVMESI

SEQ ID NO: 1090 - protein, 9 aa, Artificial Sequence
  Description of Artificial Sequence: Synthetic peptide
RVIEIVQGI

SEQ ID NO: 1091 - protein, 9 aa, Artificial Sequence
  Description of Artificial Sequence: Synthetic peptide
VQNAQGQMI

SEQ ID NO: 1092 - protein, 9 aa, Artificial Sequence
  Description of Artificial Sequence: Synthetic peptide
VQLTEPVNI

SEQ ID NO: 1093 - protein, 9 aa, Artificial Sequence
  Description of Artificial Sequence: Synthetic peptide
AVLSVINRV

SEQ ID NO: 1094 - protein, 8 aa, Artificial Sequence
  Description of Artificial Sequence: Synthetic peptide
GQMIHQSL

SEQ ID NO: 1095 - protein, 9 aa, Artificial Sequence
  Description of Artificial Sequence: Synthetic peptide
VQKVTMESI

SEQ ID NO: 1096 - protein, 9 aa, Artificial Sequence
  Description of Artificial Sequence: Synthetic peptide
QQHMLKLTV

SEQ ID NO: 1097 - protein, 9 aa, Artificial Sequence
  Description of Artificial Sequence: Synthetic peptide
QQHLLKLTV

SEQ ID NO: 1098 - protein, 9 aa, Artificial Sequence
  Description of Artificial Sequence: Synthetic peptide
GQAMYAPPI

SEQ ID NO: 1099 - protein, 9 aa, Artificial Sequence
  Description of Artificial Sequence: Synthetic peptide
AVLSIINRV

SEQ ID NO: 1100 - protein, 9 aa, Artificial Sequence
  Description of Artificial Sequence: Synthetic peptide
RVIEIGQGI

SEQ ID NO: 1101 - protein, 9 aa, Artificial Sequence
  Description of Artificial Sequence: Synthetic peptide
VLAEAMSQV

SEQ ID NO: 1102 - protein, 8 aa, Artificial Sequence
  Description of Artificial Sequence: Synthetic peptide
SQAQQTSI

SEQ ID NO: 1103 - protein, 9 aa, Artificial Sequence
  Description of Artificial Sequence: Synthetic peptide
AVLSIISRV

SEQ ID NO: 1104 - protein, 9 aa, Artificial Sequence
  Description of Artificial Sequence: Synthetic peptide
VQLNESVTI

SEQ ID NO: 1105 - protein, 10 aa, Artificial Sequence
  Description of Artificial Sequence: Synthetic peptide
RQIDSISERV

SEQ ID NO: 1106 - protein, 9 aa, Artificial Sequence
  Description of Artificial Sequence: Synthetic peptide
SLAEGKVMI

SEQ ID NO: 1107 - protein, 10 aa, Artificial Sequence
  Description of Artificial Sequence: Synthetic peptide
RQIDSISERI

SEQ ID NO: 1108 - protein, 9 aa, Artificial Sequence
  Description of Artificial Sequence: Synthetic peptide
VVKIEPLGV

SEQ ID NO: 1109 - protein, 8 aa, Artificial Sequence
  Description of Artificial Sequence: Synthetic peptide
SQVQHTNI

SEQ ID NO: 1110 - protein, 8 aa, Artificial Sequence
  Description of Artificial Sequence: Synthetic peptide
VQLTPLCV

SEQ ID NO: 1111 - protein, 10 aa, Artificial Sequence
  Description of Artificial Sequence: Synthetic peptide
KQYDQISIEI

SEQ ID NO: 1112 - protein, 10 aa, Artificial Sequence
  Description of Artificial Sequence: Synthetic peptide
KQYDQILIEI

SEQ ID NO: 1113 - protein, 9 aa, Artificial Sequence
  Description of Artificial Sequence: Synthetic peptide
RVIETVQRL

SEQ ID NO: 1114 - protein, 9 aa, Artificial Sequence
  Description of Artificial Sequence: Synthetic peptide
ALTQACPKV

SEQ ID NO: 1115 - protein, 10 aa, Artificial Sequence
  Description of Artificial Sequence: Synthetic peptide
KVVKLEPLGV

SEQ ID NO: 1116 - protein, 8 aa, Artificial Sequence
  Description of Artificial Sequence: Synthetic peptide
GQMIYQSM

SEQ ID NO: 1117 - protein, 10 aa, Artificial Sequence
  Description of Artificial Sequence: Synthetic peptide
QQSQGVETGV

SEQ ID NO: 1118 - protein, 9 aa, Artificial Sequence
  Description of Artificial Sequence: Synthetic peptide
ERYLRDQQL

SEQ ID NO: 1119 - protein, 9 aa, Artificial Sequence
  Description of Artificial Sequence: Synthetic peptide
ERFALNPSL

SEQ ID NO: 1120 - protein, 8 aa, Artificial Sequence
  Description of Artificial Sequence: Synthetic peptide
ERVLSTCL

SEQ ID NO: 1121 - protein, 9 aa, Artificial Sequence
  Description of Artificial Sequence: Synthetic peptide
ERYLKDQQL

SEQ ID NO: 1122 - protein, 8 aa, Artificial Sequence
  Description of Artificial Sequence: Synthetic peptide
ERILSTCL

SEQ ID NO: 1123 - protein, 8 aa, Artificial Sequence
  Description of Artificial Sequence: Synthetic peptide
ERVLSASL

SEQ ID NO: 1124 - protein, 9 aa, Artificial Sequence
  Description of Artificial Sequence: Synthetic peptide
DQNPPSVSL

SEQ ID NO: 1125 - protein, 9 aa, Artificial Sequence
  Description of Artificial Sequence: Synthetic peptide
ERFALNPGL

SEQ ID NO: 1126 - protein, 9 aa, Artificial Sequence
  Description of Artificial Sequence: Synthetic peptide
ERYLRDQQL

SEQ ID NO: 1127 - protein, 8 aa, Artificial Sequence
  Description of Artificial Sequence: Synthetic peptide
GQMIHQSL

SEQ ID NO: 1128 - protein, 9 aa, Artificial Sequence
  Description of Artificial Sequence: Synthetic peptide
ERYLKDQQL

SEQ ID NO: 1129 - protein, 9 aa, Artificial Sequence
  Description of Artificial Sequence: Synthetic peptide
ESYLRDQQL

SEQ ID NO: 1130 - protein, 8 aa, Artificial Sequence
  Description of Artificial Sequence: Synthetic peptide
ELLGHSSL

SEQ ID NO: 1131 - protein, 9 aa, Artificial Sequence
  Description of Artificial Sequence: Synthetic peptide
VELLGHSSL

SEQ ID NO: 1132 - protein, 8 aa, Artificial Sequence
  Description of Artificial Sequence: Synthetic peptide
ERVLSTCL

SEQ ID NO: 1133 - protein, 8 aa, Artificial Sequence
  Description of Artificial Sequence: Synthetic peptide
ERVLSASL

SEQ ID NO: 1134 - protein, 9 aa, Artificial Sequence
  Description of Artificial Sequence: Synthetic peptide
ERFALNPSL

SEQ ID NO: 1135 - protein, 9 aa, Artificial Sequence
  Description of Artificial Sequence: Synthetic peptide
DQNPPSVSL

SEQ ID NO: 1136 - protein, 8 aa, Artificial Sequence
  Description of Artificial Sequence: Synthetic peptide
IQKLVGKL

SEQ ID NO: 1137 - protein, 9 aa, Artificial Sequence
  Description of Artificial Sequence: Synthetic peptide
DSAIRRAIL

SEQ ID NO: 1138 - protein, 8 aa, Artificial Sequence
  Description of Artificial Sequence: Synthetic peptide
SQVQHTNI

SEQ ID NO: 1139 - protein, 9 aa, Artificial Sequence
  Description of Artificial Sequence: Synthetic peptide
SQVQHTNIM

SEQ ID NO: 1140 - protein, 8 aa, Artificial Sequence
  Description of Artificial Sequence: Synthetic peptide
GQMIHQSL

SEQ ID NO: 1141 - protein, 10 aa, Artificial Sequence
  Description of Artificial Sequence: Synthetic peptide
GVNSSDSETF

SEQ ID NO: 1142 - protein, 9 aa, Artificial Sequence
  Description of Artificial Sequence: Synthetic peptide
SQAQQTSIM

SEQ ID NO: 1143 - protein, 8 aa, Artificial Sequence
  Description of Artificial Sequence: Synthetic peptide
GQYIYNTY

SEQ ID NO: 1144 - protein, 9 aa, Artificial Sequence
  Description of Artificial Sequence: Synthetic peptide
RIGPGQTFY

SEQ ID NO: 1145 - protein, 9 aa, Artificial Sequence
  Description of Artificial Sequence: Synthetic peptide
GITSANETF

SEQ ID NO: 1146 - protein, 9 aa, Artificial Sequence
  Description of Artificial Sequence: Synthetic peptide
SQVQHTNIM

SEQ ID NO: 1147 - protein, 9 aa, Artificial Sequence
  Description of Artificial Sequence: Synthetic peptide
TQACPKVSF

SEQ ID NO: 1148 - protein, 9 aa, Artificial Sequence
  Description of Artificial Sequence: Synthetic peptide
TQACPKVTF

SEQ ID NO: 1149 - protein, 9 aa, Artificial Sequence
  Description of Artificial Sequence: Synthetic peptide
IRIGPGQSF

SEQ ID NO: 1150 - protein, 9 aa, Artificial Sequence
  Description of Artificial Sequence: Synthetic peptide
TQIGCTLNF

SEQ ID NO: 1151 - protein, 8 aa, Artificial Sequence
  Description of Artificial Sequence: Synthetic peptide
GQHIYHTY

SEQ ID NO: 1152 - protein, 8 aa, Artificial Sequence
  Description of Artificial Sequence: Synthetic peptide
GQQIYNTY

SEQ ID NO: 1153 - protein, 10 aa, Artificial Sequence
  Description of Artificial Sequence: Synthetic peptide
ILKDPVHGAY

SEQ ID NO: 1154 - protein, 9 aa, Artificial Sequence
  Description of Artificial Sequence: Synthetic peptide
DQNPPSVSL

SEQ ID NO: 1155 - protein, 9 aa, Artificial Sequence
  Description of Artificial Sequence: Synthetic peptide
TTNQKTELY

SEQ ID NO: 1156 - protein, 10 aa, Artificial Sequence
  Description of Artificial Sequence: Synthetic peptide
GQVVSPRCEY

SEQ ID NO: 1157 - protein, 10 aa, Artificial Sequence
  Description of Artificial Sequence: Synthetic peptide
VQNAQGQMIY

SEQ ID NO: 1158 - protein, 9 aa, Artificial Sequence
  Description of Artificial Sequence: Synthetic peptide
TVLDVGDAY

SEQ ID NO: 1159 - protein, 9 aa, Artificial Sequence
  Description of Artificial Sequence: Synthetic peptide
VRIGPGQTF

SEQ ID NO: 1160 - protein, 9 aa, Artificial Sequence
  Description of Artificial Sequence: Synthetic peptide
TLNNNTIEM

SEQ ID NO: 1161 - protein, 10 aa, Artificial Sequence
  Description of Artificial Sequence: Synthetic peptide
ILKEPVHGVY

SEQ ID NO: 1162 - protein, 9 aa, Artificial Sequence
  Description of Artificial Sequence: Synthetic peptide
QVVSPRCEY

SEQ ID NO: 1163 - protein, 10 aa, Artificial Sequence
  Description of Artificial Sequence: Synthetic peptide
SVRIGPGQTF

SEQ ID NO: 1164 - protein, 9 aa, Artificial Sequence
  Description of Artificial Sequence: Synthetic peptide
WQTPGQAMY

SEQ ID NO: 1165 - protein, 10 aa, Artificial Sequence
  Description of Artificial Sequence: Synthetic peptide
FLNKGLGISY

SEQ ID NO: 1166 - protein, 9 aa, Artificial Sequence
  Description of Artificial Sequence: Synthetic peptide
KQIIKIQNF

SEQ ID NO: 1167 - protein, 9 aa, Artificial Sequence
  Description of Artificial Sequence: Synthetic peptide
IQQEFGIPY

SEQ ID NO: 1168 - protein, 8 aa, Artificial Sequence
  Description of Artificial Sequence: Synthetic peptide
AVHVASGY

SEQ ID NO: 1169 - protein, 11 aa, Artificial Sequence
  Description of Artificial Sequence: Synthetic peptide
IQKQGQDQWTY

SEQ ID NO: 1170 - protein, 8 aa, Artificial Sequence
  Description of Artificial Sequence: Synthetic peptide
VQHPNIMM

SEQ ID NO: 1171 - protein, 8 aa, Artificial Sequence
  Description of Artificial Sequence: Synthetic peptide
AQQTSIMM

SEQ ID NO: 1172 - protein, 8 aa, Artificial Sequence
  Description of Artificial Sequence: Synthetic peptide
GQMIYQSM

SEQ ID NO: 1173 - protein, 9 aa, Artificial Sequence
  Description of Artificial Sequence: Synthetic peptide
FLGAAGSTM

SEQ ID NO: 1174 - protein, 9 aa, Artificial Sequence
  Description of Artificial Sequence: Synthetic peptide
SSSKVSQNY

SEQ ID NO: 1175 - protein, 10 aa, Artificial Sequence
  Description of Artificial Sequence: Synthetic peptide
GQGTGPTLSF

SEQ ID NO: 1176 - protein, 9 aa, Artificial Sequence
  Description of Artificial Sequence: Synthetic peptide
KQITKIQKF

SEQ ID NO: 1177 - protein, 9 aa, Artificial Sequence
  Description of Artificial Sequence: Synthetic peptide
WVNGTTSSM

SEQ ID NO: 1178 - protein, 9 aa, Artificial Sequence
  Description of Artificial Sequence: Synthetic peptide
KQGQDQWTY

SEQ ID NO: 1179 - protein, 9 aa, Artificial Sequence
  Description of Artificial Sequence: Synthetic peptide
FLGTAGSTM

SEQ ID NO: 1180 - protein, 10 aa, Artificial Sequence
  Description of Artificial Sequence: Synthetic peptide
SIRIGPGQSF

SEQ ID NO: 1181 - protein, 9 aa, Artificial Sequence
  Description of Artificial Sequence: Synthetic peptide
IQKQGQDQW

SEQ ID NO: 1182 - protein, 8 aa, Artificial Sequence
  Description of Artificial Sequence: Synthetic peptide
VQHTNIMM

SEQ ID NO: 1183 - protein, 9 aa, Artificial Sequence
  Description of Artificial Sequence: Synthetic peptide
AQEEGEVGF

SEQ ID NO: 1184 - protein, 9 aa, Artificial Sequence
  Description of Artificial Sequence: Synthetic peptide
WQRAGQAMY

SEQ ID NO: 1185 - protein, 11 aa, Artificial Sequence
  Description of Artificial Sequence: Synthetic peptide
INNGNNSSNLY

SEQ ID NO: 1186 - protein, 9 aa, Artificial Sequence
  Description of Artificial Sequence: Synthetic peptide
ALRQVVEQL

SEQ ID NO: 1187 - protein, 9 aa, Artificial Sequence
  Description of Artificial Sequence: Synthetic peptide
EQVPPLVSL

SEQ ID NO: 1188 - protein, 9 aa, Artificial Sequence
  Description of Artificial Sequence: Synthetic peptide
VQKVTMESI

SEQ ID NO: 1189 - protein, 10 aa, Artificial Sequence
  Description of Artificial Sequence: Synthetic peptide
GFLGTAGSTM

SEQ ID NO: 1190 - protein, 8 aa, Artificial Sequence
  Description of Artificial Sequence: Synthetic peptide
WQRVGQAM

SEQ ID NO: 1191 - protein, 9 aa, Artificial Sequence
  Description of Artificial Sequence: Synthetic peptide
ALRTGTEEL

SEQ ID NO: 1192 - protein, 8 aa, Artificial Sequence
  Description of Artificial Sequence: Synthetic peptide
SSKVSQNY

SEQ ID NO: 1193 - protein, 9 aa, Artificial Sequence
  Description of Artificial Sequence: Synthetic peptide
DQNPPSVSL

SEQ ID NO: 1194 - protein, 9 aa, Artificial Sequence
  Description of Artificial Sequence: Synthetic peptide
TVLDVGDAY

SEQ ID NO: 1195 - protein, 9 aa, Artificial Sequence
  Description of Artificial Sequence: Synthetic peptide
FLGAAGSTM

SEQ ID NO: 1196 - protein, 9 aa, Artificial Sequence
  Description of Artificial Sequence: Synthetic peptide
TLNNNTIEM

SEQ ID NO: 1197 - protein, 9 aa, Artificial Sequence
  Description of Artificial Sequence: Synthetic peptide
FLGTAGSTM

SEQ ID NO: 1198 - protein, 10 aa, Artificial Sequence
  Description of Artificial Sequence: Synthetic peptide
FLNKGLGISY

SEQ ID NO: 1199 - protein, 9 aa, Artificial Sequence
  Description of Artificial Sequence: Synthetic peptide
SQVQHTNIM

SEQ ID NO: 1200 - protein, 9 aa, Artificial Sequence
  Description of Artificial Sequence: Synthetic peptide
TQACPKVSF

SEQ ID NO: 1201 - protein, 10 aa, Artificial Sequence
  Description of Artificial Sequence: Synthetic peptide
SIRIGPGQSF

SEQ ID NO: 1202 - protein, 9 aa, Artificial Sequence
  Description of Artificial Sequence: Synthetic peptide
WVNGTTSSM

SEQ ID NO: 1203 - protein, 9 aa, Artificial Sequence
  Description of Artificial Sequence: Synthetic peptide
EQVPPLVSL

SEQ ID NO: 1204 - protein, 10 aa, Artificial Sequence
  Description of Artificial Sequence: Synthetic peptide
SVRIGPGQTF

SEQ ID NO: 1205 - protein, 9 aa, Artificial Sequence
  Description of Artificial Sequence: Synthetic peptide
QVVSPRCEY

SEQ ID NO: 1206 - protein, 9 aa, Artificial Sequence
  Description of Artificial Sequence: Synthetic peptide
SQAQQTSIM

SEQ ID NO: 1207 - protein, 9 aa, Artificial Sequence
  Description of Artificial Sequence: Synthetic peptide
TQACPKVTF

SEQ ID NO: 1208 - protein, 8 aa, Artificial Sequence
  Description of Artificial Sequence: Synthetic peptide
EQRWVTVY

SEQ ID NO: 1209 - protein, 9 aa, Artificial Sequence
  Description of Artificial Sequence: Synthetic peptide
IRIGPGQSF

SEQ ID NO: 1210 - protein, 9 aa, Artificial Sequence
  Description of Artificial Sequence: Synthetic peptide
AAVDLSHFL

SEQ ID NO: 1211 - protein, 10 aa, Artificial Sequence
  Description of Artificial Sequence: Synthetic peptide
DIRQGPKESF

SEQ ID NO: 1212 - protein, 10 aa, Artificial Sequence
  Description of Artificial Sequence: Synthetic peptide
NIVGGHQAAM

SEQ ID NO: 1213 - protein, 8 aa, Artificial Sequence
  Description of Artificial Sequence: Synthetic peptide
DQLIHLHY

SEQ ID NO: 1214 - protein, 8 aa, Artificial Sequence
  Description of Artificial Sequence: Synthetic peptide
GQYIYNTY

SEQ ID NO: 1215 - protein, 9 aa, Artificial Sequence
  Description of Artificial Sequence: Synthetic peptide
IVGGHQAAM

SEQ ID NO: 1216 - protein, 9 aa, Artificial Sequence
  Description of Artificial Sequence: Synthetic peptide
KALTDVVTL

SEQ ID NO: 1217 - protein, 9 aa, Artificial Sequence
  Description of Artificial Sequence: Synthetic peptide
DPIAGAETF

SEQ ID NO: 1218 - protein, 9 aa, Artificial Sequence
  Description of Artificial Sequence: Synthetic peptide
DIEITTHSF

SEQ ID NO: 1219 - protein, 9 aa, Artificial Sequence
  Description of Artificial Sequence: Synthetic peptide
DPIVGAETF

SEQ ID NO: 1220 - protein, 10 aa, Artificial Sequence
  Description of Artificial Sequence: Synthetic peptide
EVNIVTDSQY

SEQ ID NO: 1221 - protein, 8 aa, Artificial Sequence
  Description of Artificial Sequence: Synthetic peptide
AKIVVRTY

SEQ ID NO: 1222 - protein, 8 aa, Artificial Sequence
  Description of Artificial Sequence: Synthetic peptide
GQYIYNTY

SEQ ID NO: 1223 - protein, 9 aa, Artificial Sequence
  Description of Artificial Sequence: Synthetic peptide
AKNPDIIIY

SEQ ID NO: 1224 - protein, 9 aa, Artificial Sequence
  Description of Artificial Sequence: Synthetic peptide
IRIGPGQSF

SEQ ID NO: 1225 - protein, 8 aa, Artificial Sequence
  Description of Artificial Sequence: Synthetic peptide
AKLVVKTY

SEQ ID NO: 1226 - protein, 9 aa, Artificial Sequence
  Description of Artificial Sequence: Synthetic peptide
SKNPDIVIY

SEQ ID NO: 1227 - protein, 9 aa, Artificial Sequence
  Description of Artificial Sequence: Synthetic peptide
QKTELHAVY

SEQ ID NO: 1228 - protein, 8 aa, Artificial Sequence
  Description of Artificial Sequence: Synthetic peptide
GQMIHQSL

SEQ ID NO: 1229 - protein, 9 aa, Artificial Sequence
  Description of Artificial Sequence: Synthetic peptide
VRIGPGQTF

SEQ ID NO: 1230 - protein, 9 aa, Artificial Sequence
  Description of Artificial Sequence: Synthetic peptide
SKIGPENPY

SEQ ID NO: 1231 - protein, 9 aa, Artificial Sequence
  Description of Artificial Sequence: Synthetic peptide
ARVLAVESY

SEQ ID NO: 1232 - protein, 9 aa, Artificial Sequence
  Description of Artificial Sequence: Synthetic peptide
GKKAIGTVL

SEQ ID NO: 1233 - protein, 9 aa, Artificial Sequence
  Description of Artificial Sequence: Synthetic peptide
LKISAVNLY

SEQ ID NO: 1234 - protein, 9 aa, Artificial Sequence
  Description of Artificial Sequence: Synthetic peptide
WQRAGQAMY

SEQ ID NO: 1235 - protein, 10 aa, Artificial Sequence
  Description of Artificial Sequence: Synthetic peptide
VQNAQGQMIY

SEQ ID NO: 1236 - protein, 8 aa, Artificial Sequence
  Description of Artificial Sequence: Synthetic peptide
NKGLGISY

SEQ ID NO: 1237 - protein, 9 aa, Artificial Sequence
  Description of Artificial Sequence: Synthetic peptide
SQVQHTNIM

SEQ ID NO: 1238 - protein, 8 aa, Artificial Sequence
  Description of Artificial Sequence: Synthetic peptide
GQHIYHTY

SEQ ID NO: 1239 - protein, 9 aa, Artificial Sequence
  Description of Artificial Sequence: Synthetic peptide
SKNPDIIIY

SEQ ID NO: 1240 - protein, 9 aa, Artificial Sequence
  Description of Artificial Sequence: Synthetic peptide
QKTELHAIY

SEQ ID NO: 1241 - protein, 9 aa, Artificial Sequence
  Description of Artificial Sequence: Synthetic peptide
VKVIEEKAF

SEQ ID NO: 1242 - protein, 9 aa, Artificial Sequence
  Description of Artificial Sequence: Synthetic peptide
GKRAIGTVL

SEQ ID NO: 1243 - protein, 9 aa, Artificial Sequence
  Description of Artificial Sequence: Synthetic peptide
SQAQQTSIM

SEQ ID NO: 1244 - protein, 10 aa, Artificial Sequence
  Description of Artificial Sequence: Synthetic peptide
GQVVSPRCEY

SEQ ID NO: 1245 - protein, 9 aa, Artificial Sequence
  Description of Artificial Sequence: Synthetic peptide
TQACPKVSF

SEQ ID NO: 1246 - protein, 9 aa, Artificial Sequence
  Description of Artificial Sequence: Synthetic peptide
DQNPPSVSL

SEQ ID NO: 1247 - protein, 9 aa, Artificial Sequence
  Description of Artificial Sequence: Synthetic peptide
THTPNPRGL

SEQ ID NO: 1248 - protein, 9 aa, Artificial Sequence
  Description of Artificial Sequence: Synthetic peptide
THLEGKVIL

SEQ ID NO: 1249 - protein, 9 aa, Artificial Sequence
  Description of Artificial Sequence: Synthetic peptide
EHLKTAVQM

SEQ ID NO: 1250 - protein, 9 aa, Artificial Sequence
  Description of Artificial Sequence: Synthetic peptide
YQSMSPRTL

SEQ ID NO: 1251 - protein, 9 aa, Artificial Sequence
  Description of Artificial Sequence: Synthetic peptide
EQVPPLVSL

SEQ ID NO: 1252 - protein, 8 aa, Artificial Sequence
  Description of Artificial Sequence: Synthetic peptide
MHTDIISL

SEQ ID NO: 1253 - protein, 9 aa, Artificial Sequence
  Description of Artificial Sequence: Synthetic peptide
EHLRTAVQM

SEQ ID NO: 1254 - protein, 9 aa, Artificial Sequence
  Description of Artificial Sequence: Synthetic peptide
GHQAAMQML

SEQ ID NO: 1255 - protein, 9 aa, Artificial Sequence
  Description of Artificial Sequence: Synthetic peptide
SQVQHTNIM

SEQ ID NO: 1256 - protein, 10 aa, Artificial Sequence
  Description of Artificial Sequence: Synthetic peptide
HHYESSNPKV

SEQ ID NO: 1257 - protein, 9 aa, Artificial Sequence
  Description of Artificial Sequence: Synthetic peptide
HQSLSPRTL

SEQ ID NO: 1258 - protein, 9 aa, Artificial Sequence
  Description of Artificial Sequence: Synthetic peptide
THTPNPEGL

SEQ ID NO: 1259 - protein, 9 aa, Artificial Sequence
  Description of Artificial Sequence: Synthetic peptide
AHTNDVKQL

SEQ ID NO: 1260 - protein, 8 aa, Artificial Sequence
  Description of Artificial Sequence: Synthetic peptide
LHQVVEQL

SEQ ID NO: 1261 - protein, 9 aa, Artificial Sequence
  Description of Artificial Sequence: Synthetic peptide
SQAQQTSIM

SEQ ID NO: 1262 - protein, 10 aa, Artificial Sequence
  Description of Artificial Sequence: Synthetic peptide
IHQSLSPRTL

SEQ ID NO: 1263 - protein, 9 aa, Artificial Sequence
  Description of Artificial Sequence: Synthetic peptide
IRIGPGQSF

SEQ ID NO: 1264 - protein, 9 aa, Artificial Sequence
  Description of Artificial Sequence: Synthetic peptide
SQIYPGIKV

SEQ ID NO: 1265 - protein, 8 aa, Artificial Sequence
  Description of Artificial Sequence: Synthetic peptide
THLEGKVI

SEQ ID NO: 1266 - protein, 10 aa, Artificial Sequence
  Description of Artificial Sequence: Synthetic peptide
SHEVIFNSTL

SEQ ID NO: 1267 - protein, 9 aa, Artificial Sequence
  Description of Artificial Sequence: Synthetic peptide
TVLDVGDAY

SEQ ID NO: 1268 - protein, 9 aa, Artificial Sequence
  Description of Artificial Sequence: Synthetic peptide
SAVNLYDTI

SEQ ID NO: 1269 - protein, 9 aa, Artificial Sequence
  Description of Artificial Sequence: Synthetic peptide
TINEEAAEW

SEQ ID NO: 1270 - protein, 9 aa, Artificial Sequence
  Description of Artificial Sequence: Synthetic peptide
TIAIAVAGW

SEQ ID NO: 1271 - protein, 9 aa, Artificial Sequence
  Description of Artificial Sequence: Synthetic peptide
DELALLIEM

SEQ ID NO: 1272 - protein, 8 aa, Artificial Sequence
  Description of Artificial Sequence: Synthetic peptide
IEITTHSF

SEQ ID NO: 1273 - protein, 8 aa, Artificial Sequence
  Description of Artificial Sequence: Synthetic peptide
MENVTEEF

SEQ ID NO: 1274 - protein, 9 aa, Artificial Sequence
  Description of Artificial Sequence: Synthetic peptide
TENLWVTVY

SEQ ID NO: 1275 - protein, 11 aa, Artificial Sequence
  Description of Artificial Sequence: Synthetic peptide
SEVNIVTDSQY

SEQ ID NO: 1276 - protein, 8 aa, Artificial Sequence
  Description of Artificial Sequence: Synthetic peptide
LEITTHSF

SEQ ID NO: 1277 - protein, 8 aa, Artificial Sequence
  Description of Artificial Sequence: Synthetic peptide
NETPGIRY

SEQ ID NO: 1278 - protein, 8 aa, Artificial Sequence
  Description of Artificial Sequence: Synthetic peptide
HEVIFNST

SEQ ID NO: 1279 - protein, 8 aa, Artificial Sequence
  Description of Artificial Sequence: Synthetic peptide
NETPGTRY

SEQ ID NO: 1280 - protein, 9 aa, Artificial Sequence
  Description of Artificial Sequence: Synthetic peptide
AEVVQKVTM

SEQ ID NO: 1281 - protein, 9 aa, Artificial Sequence
  Description of Artificial Sequence: Synthetic peptide
HEVIFNSTL

SEQ ID NO: 1282 - protein, 9 aa, Artificial Sequence
  Description of Artificial Sequence: Synthetic peptide
AEVVQKVVM

SEQ ID NO: 1283 - protein, 8 aa, Artificial Sequence
  Description of Artificial Sequence: Synthetic peptide
EEIKNCSY

SEQ ID NO: 1284 - protein, 9 aa, Artificial Sequence
  Description of Artificial Sequence: Synthetic peptide
DEVGFPVRP

SEQ ID NO: 1285 - protein, 8 aa, Artificial Sequence
  Description of Artificial Sequence: Synthetic peptide
EEIKNCSF

SEQ ID NO: 1286 - protein, 8 aa, Artificial Sequence
  Description of Artificial Sequence: Synthetic peptide
VEAIIRTL

SEQ ID NO: 1287 - protein, 9 aa, Artificial Sequence
  Description of Artificial Sequence: Synthetic peptide
ARVLAVESY

SEQ ID NO: 1288 - protein, 9 aa, Artificial Sequence
  Description of Artificial Sequence: Synthetic peptide
IRIGPGQSF

SEQ ID NO: 1289 - protein, 9 aa, Artificial Sequence
  Description of Artificial Sequence: Synthetic peptide
VRIGPGQTF

SEQ ID NO: 1290 - protein, 9 aa, Artificial Sequence
  Description of Artificial Sequence: Synthetic peptide
ARVLAVERY

SEQ ID NO: 1291 - protein, 10 aa, Artificial Sequence
  Description of Artificial Sequence: Synthetic peptide
VRIGPGQTFY

SEQ ID NO: 1292 - protein, 10 aa, Artificial Sequence
  Description of Artificial Sequence: Synthetic peptide
VRQGYSPLSF

SEQ ID NO: 1293 - protein, 10 aa, Artificial Sequence
  Description of Artificial Sequence: Synthetic peptide
GGLDGLVYSK

SEQ ID NO: 1294 - protein, 10 aa, Artificial Sequence
  Description of Artificial Sequence: Synthetic peptide
GGLDGLIYSK

SEQ ID NO: 1295 - protein, 9 aa, Artificial Sequence
  Description of Artificial Sequence: Synthetic peptide
SRIGPENPY

SEQ ID NO: 1296 - protein, 8 aa, Artificial Sequence
  Description of Artificial Sequence: Synthetic peptide
LDGLVYSK

SEQ ID NO: 1297 - protein, 9 aa, Artificial Sequence
  Description of Artificial Sequence: Synthetic peptide
GLDGLVYSK

SEQ ID NO: 1298 - protein, 9 aa, Artificial Sequence
  Description of Artificial Sequence: Synthetic peptide
ERQGPEPTF

SEQ ID NO: 1299 - protein, 9 aa, Artificial Sequence
  Description of Artificial Sequence: Synthetic peptide
GLDGLIYSK

SEQ ID NO: 1300 - protein, 9 aa, Artificial Sequence
  Description of Artificial Sequence: Synthetic peptide
ILGQVVSPR

SEQ ID NO: 1301 - protein, 10 aa, Artificial Sequence
  Description of Artificial Sequence: Synthetic peptide
DQISIEICGK

SEQ ID NO: 1302 - protein, 11 aa, Artificial Sequence
  Description of Artificial Sequence: Synthetic peptide
HGLGQQIYNTY

SEQ ID NO: 1303 - protein, 11 aa, Artificial Sequence
  Description of Artificial Sequence: Synthetic peptide
YATGEIIGDIR

SEQ ID NO: 1304 - protein, 8 aa, Artificial Sequence
  Description of Artificial Sequence: Synthetic peptide
QRVGQAMY

SEQ ID NO: 1305 - protein, 9 aa, Artificial Sequence
  Description of Artificial Sequence: Synthetic peptide
GRWPVKVVH

SEQ ID NO: 1306 - protein, 9 aa, Artificial Sequence
  Description of Artificial Sequence: Synthetic peptide
IRQTPTAAR

SEQ ID NO: 1307 - protein, 9 aa, Artificial Sequence
  Description of Artificial Sequence: Synthetic peptide
IRIGPGQSF

SEQ ID NO: 1308 - protein, 9 aa, Artificial Sequence
  Description of Artificial Sequence: Synthetic peptide
SRIGIVRGR

SEQ ID NO: 1309 - protein, 9 aa, Artificial Sequence
  Description of Artificial Sequence: Synthetic peptide
ARVLAVERY

SEQ ID NO: 1310 - protein, 9 aa, Artificial Sequence
  Description of Artificial Sequence: Synthetic peptide
ARVLAVESY

SEQ ID NO: 1311 - protein, 10 aa, Artificial Sequence
  Description of Artificial Sequence: Synthetic peptide
VRIGPGQTFY

SEQ ID NO: 1312 - protein, 9 aa, Artificial Sequence
  Description of Artificial Sequence: Synthetic peptide
VRIGPGQTF

SEQ ID NO: 1313 - protein, 9 aa, Artificial Sequence
  Description of Artificial Sequence: Synthetic peptide
RRGPPQSNK

SEQ ID NO: 1314 - protein, 9 aa, Artificial Sequence
  Description of Artificial Sequence: Synthetic peptide
TRQAPTAAK

SEQ ID NO: 1315 - protein, 9 aa, Artificial Sequence
  Description of Artificial Sequence: Synthetic peptide
GRAILNIPR

SEQ ID NO: 1316 - protein, 9 aa, Artificial Sequence
  Description of Artificial Sequence: Synthetic peptide
QRIDVKDTK

SEQ ID NO: 1317 - protein, 9 aa, Artificial Sequence
  Description of Artificial Sequence: Synthetic peptide
QRIEVKDTK

SEQ ID NO: 1318 - protein, 9 aa, Artificial Sequence
  Description of Artificial Sequence: Synthetic peptide
SRIGPENPY

SEQ ID NO: 1319 - protein, 9 aa, Artificial Sequence
  Description of Artificial Sequence: Synthetic peptide
TRTSIRIGP

SEQ ID NO: 1320 - protein, 9 aa, Artificial Sequence
  Description of Artificial Sequence: Synthetic peptide
DPIAGAETF

SEQ ID NO: 1321 - protein, 11 aa, Artificial Sequence
  Description of Artificial Sequence: Synthetic peptide
IPAETGQETAY

SEQ ID NO: 1322 - protein, 9 aa, Artificial Sequence
  Description of Artificial Sequence: Synthetic peptide
NPDIIIYQY

SEQ ID NO: 1323 - protein, 9 aa, Artificial Sequence
  Description of Artificial Sequence: Synthetic peptide
NPDIVIYQY

SEQ ID NO: 1324 - protein, 9 aa, Artificial Sequence
  Description of Artificial Sequence: Synthetic peptide
DPIVGAETF

SEQ ID NO: 1325 - protein, 11 aa, Artificial Sequence
  Description of Artificial Sequence: Synthetic peptide
VPIGNNSDSEY

SEQ ID NO: 1326 - protein, 9 aa, Artificial Sequence
  Description of Artificial Sequence: Synthetic peptide
DPEVTTHSF

SEQ ID NO: 1327 - protein, 9 aa, Artificial Sequence
  Description of Artificial Sequence: Synthetic peptide
TVLDVGDAY

SEQ ID NO: 1328 - protein, 8 aa, Artificial Sequence
  Description of Artificial Sequence: Synthetic peptide
TPGPGIRY

SEQ ID NO: 1329 - protein, 9 aa, Artificial Sequence
  Description of Artificial Sequence: Synthetic peptide
EALDKIEEM

SEQ ID NO: 1330 - protein, 9 aa, Artificial Sequence
  Description of Artificial Sequence: Synthetic peptide
EPAQPLVSL

SEQ ID NO: 1331 - protein, 9 aa, Artificial Sequence
  Description of Artificial Sequence: Synthetic peptide
SPAIFQASM

SEQ ID NO: 1332 - protein, 10 aa, Artificial Sequence
  Description of Artificial Sequence: Synthetic peptide
NPPIPVGDIY

SEQ ID NO: 1333 - protein, 10 aa, Artificial Sequence
  Description of Artificial Sequence: Synthetic peptide
VPLDENFRKY

SEQ ID NO: 1334 - protein, 9 aa, Artificial Sequence
  Description of Artificial Sequence: Synthetic peptide
SPAIFQSSM

SEQ ID NO: 1335 - protein, 9 aa, Artificial Sequence
  Description of Artificial Sequence: Synthetic peptide
PPIPVGDIY

SEQ ID NO: 1336 - protein, 10 aa, Artificial Sequence
  Description of Artificial Sequence: Synthetic peptide
VPLDESFRKY

SEQ ID NO: 1337 - protein, 10 aa, Artificial Sequence
  Description of Artificial Sequence: Synthetic peptide
DPIAGAETFY

SEQ ID NO: 1338 - protein, 9 aa, Artificial Sequence
  Description of Artificial Sequence: Synthetic peptide
FPISPIETV

SEQ ID NO: 1339 - protein, 9 aa, Artificial Sequence
  Description of Artificial Sequence: Synthetic peptide
QPDKSESEL

SEQ ID NO: 1340 - protein, 9 aa, Artificial Sequence
  Description of Artificial Sequence: Synthetic peptide
QPDRSESEL

SEQ ID NO: 1341 - protein, 9 aa, Artificial Sequence
  Description of Artificial Sequence: Synthetic peptide
DPIAGAETF

SEQ ID NO: 1342 - protein, 9 aa, Artificial Sequence
  Description of Artificial Sequence: Synthetic peptide
YSTQIDPDL

SEQ ID NO: 1343 - protein, 9 aa, Artificial Sequence
  Description of Artificial Sequence: Synthetic peptide
LVDMGDYDL

SEQ ID NO: 1344 - protein, 8 aa, Artificial Sequence
  Description of Artificial Sequence: Synthetic peptide
NVTEDFNM

SEQ ID NO: 1345 - protein, 9 aa, Artificial Sequence
  Description of Artificial Sequence: Synthetic peptide
DPNPQEIHL

SEQ ID NO: 1346 - protein, 9 aa, Artificial Sequence
  Description of Artificial Sequence: Synthetic peptide
IVTDSQYVL

SEQ ID NO: 1347 - protein, 9 aa, Artificial Sequence
  Description of Artificial Sequence: Synthetic peptide
DPSPQELKM

SEQ ID NO: 1348 - protein, 9 aa, Artificial Sequence
  Description of Artificial Sequence: Synthetic peptide
FPISPIETV

SEQ ID NO: 1349 - protein, 9 aa, Artificial Sequence
  Description of Artificial Sequence: Synthetic peptide
MDDEEKETL

SEQ ID NO: 1350 - protein, 9 aa, Artificial Sequence
  Description of Artificial Sequence: Synthetic peptide
DPIAGAETF

SEQ ID NO: 1351 - protein, 9 aa, Artificial Sequence
  Description of Artificial Sequence: Synthetic peptide
FPISPIETV

SEQ ID NO: 1352 - protein, 9 aa, Artificial Sequence
  Description of Artificial Sequence: Synthetic peptide
EPAQPLVSL

SEQ ID NO: 1353 - protein, 9 aa, Artificial Sequence
  Description of Artificial Sequence: Synthetic peptide
HPVHAGPVA

SEQ ID NO: 1354 - protein, 9 aa, Artificial Sequence
  Description of Artificial Sequence: Synthetic peptide
TPQDLNVML

SEQ ID NO: 1355 - protein, 9 aa, Artificial Sequence
  Description of Artificial Sequence: Synthetic peptide
YSTQIDPDL

SEQ ID NO: 1356 - protein, 9 aa, Artificial Sequence
  Description of Artificial Sequence: Synthetic peptide
DPIVGAETF

SEQ ID NO: 1357 - protein, 9 aa, Artificial Sequence
  Description of Artificial Sequence: Synthetic peptide
YDLGDDNNL

SEQ ID NO: 1358 - protein, 9 aa, Artificial Sequence
  Description of Artificial Sequence: Synthetic peptide
DPNPQEIHL

SEQ ID NO: 1359 - protein, 9 aa, Artificial Sequence
  Description of Artificial Sequence: Synthetic peptide
FPISPISTV

SEQ ID NO: 1360 - protein, 9 aa, Artificial Sequence
  Description of Artificial Sequence: Synthetic peptide
TPQDLNMML

SEQ ID NO: 1361 - protein, 9 aa, Artificial Sequence
  Description of Artificial Sequence: Synthetic peptide
TALNETIIL

SEQ ID NO: 1362 - protein, 9 aa, Artificial Sequence
  Description of Artificial Sequence: Synthetic peptide
IVTDSQYVL

SEQ ID NO: 1363 - protein, 9 aa, Artificial Sequence
  Description of Artificial Sequence: Synthetic peptide
IVTDSQYAL

SEQ ID NO: 1364 - protein, 10 aa, Artificial Sequence
  Description of Artificial Sequence: Synthetic peptide
SPIETVPVKL

SEQ ID NO: 1365 - protein, 9 aa, Artificial Sequence
  Description of Artificial Sequence: Synthetic peptide
DQNPPSVSL

SEQ ID NO: 1366 - protein, 10 aa, Artificial Sequence
  Description of Artificial Sequence: Synthetic peptide
VPTDPSPQEL

SEQ ID NO: 1367 - protein, 9 aa, Artificial Sequence
  Description of Artificial Sequence: Synthetic peptide
YDLGDINNL

SEQ ID NO: 1368 - protein, 9 aa, Artificial Sequence
  Description of Artificial Sequence: Synthetic peptide
EALDKIEEM

SEQ ID NO: 1369 - protein, 9 aa, Artificial Sequence
  Description of Artificial Sequence: Synthetic peptide
YDLGNDINL

SEQ ID NO: 1370 - protein, 10 aa, Artificial Sequence
  Description of Artificial Sequence: Synthetic peptide
SPISTVPVKL

SEQ ID NO: 1371 - protein, 9 aa, Artificial Sequence
  Description of Artificial Sequence: Synthetic peptide
QAQQTSIMM

SEQ ID NO: 1372 - protein, 9 aa, Artificial Sequence
  Description of Artificial Sequence: Synthetic peptide
QPDKSESEL

SEQ ID NO: 1373 - protein, 9 aa, Artificial Sequence
  Description of Artificial Sequence: Synthetic peptide
EQVPPLVSL

SEQ ID NO: 1374 - protein, 11 aa, Artificial Sequence
  Description of Artificial Sequence: Synthetic peptide
IPAETGQETAY

SEQ ID NO: 1375 - protein, 9 aa, Artificial Sequence
  Description of Artificial Sequence: Synthetic peptide
NPDIVIYQY

SEQ ID NO: 1376 - protein, 9 aa, Artificial Sequence
  Description of Artificial Sequence: Synthetic peptide
NPDIIIYQY

SEQ ID NO: 1377 - protein, 11 aa, Artificial Sequence
  Description of Artificial Sequence: Synthetic peptide
VPIGNNSDSEY

SEQ ID NO: 1378 - protein, 9 aa, Artificial Sequence
  Description of Artificial Sequence: Synthetic peptide
DPIAGAETF

SEQ ID NO: 1379 - protein, 9 aa, Artificial Sequence
  Description of Artificial Sequence: Synthetic peptide
DPEVTTHSF

SEQ ID NO: 1380 - protein, 10 aa, Artificial Sequence
  Description of Artificial Sequence: Synthetic peptide
NPPIPVGDIY

SEQ ID NO: 1381 - protein, 9 aa, Artificial Sequence
  Description of Artificial Sequence: Synthetic peptide
DPIVGAETF

SEQ ID NO: 1382 - protein, 9 aa, Artificial Sequence
  Description of Artificial Sequence: Synthetic peptide
FSVPLDESF

SEQ ID NO: 1383 - protein, 9 aa, Artificial Sequence
  Description of Artificial Sequence: Synthetic peptide
PPIPVGDIY

SEQ ID NO: 1384 - protein, 9 aa, Artificial Sequence
  Description of Artificial Sequence: Synthetic peptide
TVLDVGDAY

SEQ ID NO: 1385 - protein, 9 aa, Artificial Sequence
  Description of Artificial Sequence: Synthetic peptide
EALDKIEEM

SEQ ID NO: 1386 - protein, 8 aa, Artificial Sequence
  Description of Artificial Sequence: Synthetic peptide
TPGPGIRY

SEQ ID NO: 1387 - protein, 9 aa, Artificial Sequence
  Description of Artificial Sequence: Synthetic peptide
QPDKSESEL

SEQ ID NO: 1388 - protein, 9 aa, Artificial Sequence
  Description of Artificial Sequence: Synthetic peptide
QPDRSESEL

SEQ ID NO: 1389 - protein, 9 aa, Artificial Sequence
  Description of Artificial Sequence: Synthetic peptide
DPIAGAETF

SEQ ID NO: 1390 - protein, 9 aa, Artificial Sequence
  Description of Artificial Sequence: Synthetic peptide
DPNPQEIHL

SEQ ID NO: 1391 - protein, 9 aa, Artificial Sequence
  Description of Artificial Sequence: Synthetic peptide
DPSPQELKM

SEQ ID NO: 1392 - protein, 9 aa, Artificial Sequence
  Description of Artificial Sequence: Synthetic peptide
LVDMGDYDL

SEQ ID NO: 1393 - protein, 9 aa, Artificial Sequence
  Description of Artificial Sequence: Synthetic peptide
YSTQIDPDL

SEQ ID NO: 1394 - protein, 8 aa, Artificial Sequence
  Description of Artificial Sequence: Synthetic peptide
NVTEDFNM

SEQ ID NO: 1395 - protein, 9 aa, Artificial Sequence
  Description of Artificial Sequence: Synthetic peptide
IVTDSQYVL

SEQ ID NO: 1396 - protein, 8 aa, Artificial Sequence
  Description of Artificial Sequence: Synthetic peptide
DPDLADQL

SEQ ID NO: 1397 - protein, 9 aa, Artificial Sequence
  Description of Artificial Sequence: Synthetic peptide
FPISPIETV

SEQ ID NO: 1398 - protein, 9 aa, Artificial Sequence
  Description of Artificial Sequence: Synthetic peptide
SPVSILDVK

SEQ ID NO: 1399 - protein, 9 aa, Artificial Sequence
  Description of Artificial Sequence: Synthetic peptide
DPEVTTHSF

SEQ ID NO: 1400 - protein, 9 aa, Artificial Sequence
  Description of Artificial Sequence: Synthetic peptide
DPIVGAETF

SEQ ID NO: 1401 - protein, 9 aa, Artificial Sequence
  Description of Artificial Sequence: Synthetic peptide
FSVPLDESF

SEQ ID NO: 1402 - protein, 9 aa, Artificial Sequence
  Description of Artificial Sequence: Synthetic peptide
TPQDLNVML

SEQ ID NO: 1403 - protein, 9 aa, Artificial Sequence
  Description of Artificial Sequence: Synthetic peptide
EPAQPLVSL

SEQ ID NO: 1404 - protein, 9 aa, Artificial Sequence
  Description of Artificial Sequence: Synthetic peptide
EALDKIEEM

SEQ ID NO: 1405 - protein, 9 aa, Artificial Sequence
  Description of Artificial Sequence: Synthetic peptide
HPVHAGPVA

SEQ ID NO: 1406 - protein, 9 aa, Artificial Sequence
  Description of Artificial Sequence: Synthetic peptide
YDLGDINNL

SEQ ID NO: 1407 - protein, 8 aa, Artificial Sequence
  Description of Artificial Sequence: Synthetic peptide
IEITTHSF

SEQ ID NO: 1408 - protein, 8 aa, Artificial Sequence
  Description of Artificial Sequence: Synthetic peptide
KDAETTLF

SEQ ID NO: 1409 - protein, 10 aa, Artificial Sequence
  Description of Artificial Sequence: Synthetic peptide
KEQVPPLVSL

SEQ ID NO: 1410 - protein, 9 aa, Artificial Sequence
  Description of Artificial Sequence: Synthetic peptide
AEVVQKVTM

SEQ ID NO: 1411 - protein, 8 aa, Artificial Sequence
  Description of Artificial Sequence: Synthetic peptide
MENVTEEF

SEQ ID NO: 1412 - protein, 8 aa, Artificial Sequence
  Description of Artificial Sequence: Synthetic peptide
KDAKTTLF

SEQ ID NO: 1413 - protein, 8 aa, Artificial Sequence
  Description of Artificial Sequence: Synthetic peptide
IDSISERV

SEQ ID NO: 1414 - protein, 8 aa, Artificial Sequence
  Description of Artificial Sequence: Synthetic peptide
YDTIAIAV

SEQ ID NO: 1415 - protein, 9 aa, Artificial Sequence
  Description of Artificial Sequence: Synthetic peptide
ADMEREGKI

SEQ ID NO: 1416 - protein, 8 aa, Artificial Sequence
  Description of Artificial Sequence: Synthetic peptide
YDTEVHNV

SEQ ID NO: 1417 - protein, 8 aa, Artificial Sequence
  Description of Artificial Sequence: Synthetic peptide
AEHLKTAV

SEQ ID NO: 1418 - protein, 10 aa, Artificial Sequence
  Description of Artificial Sequence: Synthetic peptide
REPAQPLVSL

SEQ ID NO: 1419 - protein, 8 aa, Artificial Sequence
  Description of Artificial Sequence: Synthetic peptide
KDANTTLF

SEQ ID NO: 1420 - protein, 9 aa, Artificial Sequence
  Description of Artificial Sequence: Synthetic peptide
AEVVQKVVM

SEQ ID NO: 1421 - protein, 8 aa, Artificial Sequence
  Description of Artificial Sequence: Synthetic peptide
KENIIVQL

SEQ ID NO: 1422 - protein, 9 aa, Artificial Sequence
  Description of Artificial Sequence: Synthetic peptide
VELLGHSSL

SEQ ID NO: 1423 - protein, 8 aa, Artificial Sequence
  Description of Artificial Sequence: Synthetic peptide
TDIQTREL

SEQ ID NO: 1424 - protein, 8 aa, Artificial Sequence
  Description of Artificial Sequence: Synthetic peptide
KEFNGTGL

SEQ ID NO: 1425 - protein, 8 aa, Artificial Sequence
  Description of Artificial Sequence: Synthetic peptide
AEHLRTAV

SEQ ID NO: 1426 - protein, 9 aa, Artificial Sequence
  Description of Artificial Sequence: Synthetic peptide
YDLGDINNL

SEQ ID NO: 1427 - protein, 9 aa, Artificial Sequence
  Description of Artificial Sequence: Synthetic peptide
QHSRIGINI

SEQ ID NO: 1428 - protein, 9 aa, Artificial Sequence
  Description of Artificial Sequence: Synthetic peptide
THTPNPEGL

SEQ ID NO: 1429 - protein, 9 aa, Artificial Sequence
  Description of Artificial Sequence: Synthetic peptide
YDLGDDNNL

SEQ ID NO: 1430 - protein, 9 aa, Artificial Sequence
  Description of Artificial Sequence: Synthetic peptide
ERQGPEPTF

SEQ ID NO: 1431 - protein, 9 aa, Artificial Sequence
  Description of Artificial Sequence: Synthetic peptide
VHTDNGSNF

SEQ ID NO: 1432 - protein, 9 aa, Artificial Sequence
  Description of Artificial Sequence: Synthetic peptide
ERQGTGPTF

SEQ ID NO: 1433 - protein, 9 aa, Artificial Sequence
  Description of Artificial Sequence: Synthetic peptide
IRIGPGQSF

SEQ ID NO: 1434 - protein, 9 aa, Artificial Sequence
  Description of Artificial Sequence: Synthetic peptide
THLEGKVIL

SEQ ID NO: 1435 - protein, 11 aa, Artificial Sequence
  Description of Artificial Sequence: Synthetic peptide
TQIDPDLADQL

SEQ ID NO: 1436 - protein, 11 aa, Artificial Sequence
  Description of Artificial Sequence: Synthetic peptide
TQIDPDQADQL

SEQ ID NO: 1437 - protein, 9 aa, Artificial Sequence
  Description of Artificial Sequence: Synthetic peptide
NHSGGDPEV

SEQ ID NO: 1438 - protein, 9 aa, Artificial Sequence
  Description of Artificial Sequence: Synthetic peptide
YDLGNDINL

SEQ ID NO: 1439 - protein, 10 aa, Artificial Sequence
  Description of Artificial Sequence: Synthetic peptide
SHEVIFNSTL

SEQ ID NO: 1440 - protein, 9 aa, Artificial Sequence
  Description of Artificial Sequence: Synthetic peptide
VRIGPGQTF

SEQ ID NO: 1441 - protein, 9 aa, Artificial Sequence
  Description of Artificial Sequence: Synthetic peptide
TQDFWEVQL

SEQ ID NO: 1442 - protein, 9 aa, Artificial Sequence
  Description of Artificial Sequence: Synthetic peptide
DQNPPSVSL

SEQ ID NO: 1443 - protein, 9 aa, Artificial Sequence
  Description of Artificial Sequence: Synthetic peptide
EQVPPLVSL

SEQ ID NO: 1444 - protein, 9 aa, Artificial Sequence
  Description of Artificial Sequence: Synthetic peptide
GHQAAMQML

SEQ ID NO: 1445 - protein, 9 aa, Artificial Sequence
  Description of Artificial Sequence: Synthetic peptide
AHTNDVKQL

SEQ ID NO: 1446 - protein, 9 aa, Artificial Sequence
  Description of Artificial Sequence: Synthetic peptide
EHLKTAVQM

SEQ ID NO: 1447 - protein, 10 aa, Artificial Sequence
  Description of Artificial Sequence: Synthetic peptide
NYDLGDINNL

SEQ ID NO: 1448 - protein, 10 aa, Artificial Sequence
  Description of Artificial Sequence: Synthetic peptide
NYDLGNDINL

SEQ ID NO: 1449 - protein, 8 aa, Artificial Sequence
  Description of Artificial Sequence: Synthetic peptide
FHATGDII

SEQ ID NO: 1450 - protein, 10 aa, Artificial Sequence
  Description of Artificial Sequence: Synthetic peptide
QIDSISERVL

SEQ ID NO: 1451 - protein, 9 aa, Artificial Sequence
  Description of Artificial Sequence: Synthetic peptide
QYDQISIEI

SEQ ID NO: 1452 - protein, 9 aa, Artificial Sequence
  Description of Artificial Sequence: Synthetic peptide
DQNPPSVSL

SEQ ID NO: 1453 - protein, 9 aa, Artificial Sequence
  Description of Artificial Sequence: Synthetic peptide
EQVPPLVSL

SEQ ID NO: 1454 - protein, 9 aa, Artificial Sequence
  Description of Artificial Sequence: Synthetic peptide
ERQGPEPTF

SEQ ID NO: 1455 - protein, 9 aa, Artificial Sequence
  Description of Artificial Sequence: Synthetic peptide
ERQGTGPTF

SEQ ID NO: 1456 - protein, 9 aa, Artificial Sequence
  Description of Artificial Sequence: Synthetic peptide
THTPNPEGL

SEQ ID NO: 1457 - protein, 11 aa, Artificial Sequence
  Description of Artificial Sequence: Synthetic peptide
TQIDPDLADQL

SEQ ID NO: 1458 - protein, 9 aa, Artificial Sequence
  Description of Artificial Sequence: Synthetic peptide
IRIGPGQSF

SEQ ID NO: 1459 - protein, 9 aa, Artificial Sequence
  Description of Artificial Sequence: Synthetic peptide
YDLGDINNL

SEQ ID NO: 1460 - protein, 11 aa, Artificial Sequence
  Description of Artificial Sequence: Synthetic peptide
TQIDPDQADQL

SEQ ID NO: 1461 - protein, 9 aa, Artificial Sequence
  Description of Artificial Sequence: Synthetic peptide
NHSGGDPEV

SEQ ID NO: 1462 - protein, 11 aa, Artificial Sequence
  Description of Artificial Sequence: Synthetic peptide
VHAGPVAPGQM

SEQ ID NO: 1463 - protein, 9 aa, Artificial Sequence
  Description of Artificial Sequence: Synthetic peptide
THLEGKVIL

SEQ ID NO: 1464 - protein, 9 aa, Artificial Sequence
  Description of Artificial Sequence: Synthetic peptide
EHLKTAVQM

SEQ ID NO: 1465 - protein, 8 aa, Artificial Sequence
  Description of Artificial Sequence: Synthetic peptide
MHTDIISL

SEQ ID NO: 1466 - protein, 9 aa, Artificial Sequence
  Description of Artificial Sequence: Synthetic peptide
SQAQQTSIM

SEQ ID NO: 1467 - protein, 9 aa, Artificial Sequence
  Description of Artificial Sequence: Synthetic peptide
VRIGPGQTF

SEQ ID NO: 1468 - protein, 9 aa, Artificial Sequence
  Description of Artificial Sequence: Synthetic peptide
SQVQHTNIM

SEQ ID NO: 1469 - protein, 9 aa, Artificial Sequence
  Description of Artificial Sequence: Synthetic peptide
EGQGTGPTL

SEQ ID NO: 1470 - protein, 10 aa, Artificial Sequence
  Description of Artificial Sequence: Synthetic peptide
TQQEINEQEL

SEQ ID NO: 1471 - protein, 9 aa, Artificial Sequence
  Description of Artificial Sequence: Synthetic peptide
DREPAQPLV

SEQ ID NO: 1472 - protein, 9 aa, Artificial Sequence
  Description of Artificial Sequence: Synthetic peptide
SQVQHPNIM

SEQ ID NO: 1473 - protein, 8 aa, Artificial Sequence
  Description of Artificial Sequence: Synthetic peptide
LHQVVEQL

SEQ ID NO: 1474 - protein, 9 aa, Artificial Sequence
  Description of Artificial Sequence: Synthetic peptide
VHTDNGSNF

SEQ ID NO: 1475 - protein, 9 aa, Artificial Sequence
  Description of Artificial Sequence: Synthetic peptide
YDLGDDNNL

SEQ ID NO: 1476 - protein, 9 aa, Artificial Sequence
  Description of Artificial Sequence: Synthetic peptide
THTPNPRGL

SEQ ID NO: 1477 - protein, 9 aa, Artificial Sequence
  Description of Artificial Sequence: Synthetic peptide
ERIRQTPTA

SEQ ID NO: 1478 - protein, 10 aa, Artificial Sequence
  Description of Artificial Sequence: Synthetic peptide
SQYALGIIQA

SEQ ID NO: 1479 - protein, 8 aa, Artificial Sequence
  Description of Artificial Sequence: Synthetic peptide
WQRPIVTV

SEQ ID NO: 1480 - protein, 9 aa, Artificial Sequence
  Description of Artificial Sequence: Synthetic peptide
VQLGIPHPA

SEQ ID NO: 1481 - protein, 10 aa, Artificial Sequence
  Description of Artificial Sequence: Synthetic peptide
SQYVLGIIQA

SEQ ID NO: 1482 - protein, 8 aa, Artificial Sequence
  Description of Artificial Sequence: Synthetic peptide
THGIKPVV

SEQ ID NO: 1483 - protein, 8 aa, Artificial Sequence
  Description of Artificial Sequence: Synthetic peptide
THGIRPVV

SEQ ID NO: 1484 - protein, 9 aa, Artificial Sequence
  Description of Artificial Sequence: Synthetic peptide
QNYPIVQNA

SEQ ID NO: 1485 - protein, 9 aa, Artificial Sequence
  Description of Artificial Sequence: Synthetic peptide
TRDGGITSA

SEQ ID NO: 1486 - protein, 10 aa, Artificial Sequence
  Description of Artificial Sequence: Synthetic peptide
ERIRQTPTAA

SEQ ID NO: 1487 - protein, 10 aa, Artificial Sequence
  Description of Artificial Sequence: Synthetic peptide
NHPGSQPTTA

SEQ ID NO: 1488 - protein, 8 aa, Artificial Sequence
  Description of Artificial Sequence: Synthetic peptide
WQRPLVTV

SEQ ID NO: 1489 - protein, 8 aa, Artificial Sequence
  Description of Artificial Sequence: Synthetic peptide
DQISIEIC

SEQ ID NO: 1490 - protein, 8 aa, Artificial Sequence
  Description of Artificial Sequence: Synthetic peptide
DQILIEIC

SEQ ID NO: 1491 - protein, 9 aa, Artificial Sequence
  Description of Artificial Sequence: Synthetic peptide
QIMEQLQSA

SEQ ID NO: 1492 - protein, 8 aa, Artificial Sequence
  Description of Artificial Sequence: Synthetic peptide
SMTLTVQA

SEQ ID NO: 1493 - protein, 8 aa, Artificial Sequence
  Description of Artificial Sequence: Synthetic peptide
TRPPLPSV

SEQ ID NO: 1494 - protein, 9 aa, Artificial Sequence
  Description of Artificial Sequence: Synthetic peptide
YQLEKDPIA

SEQ ID NO: 1495 - protein, 8 aa, Artificial Sequence
  Description of Artificial Sequence: Synthetic peptide
GKVILVAV

SEQ ID NO: 1496 - protein, 9 aa, Artificial Sequence
  Description of Artificial Sequence: Synthetic peptide
QRVGQAMYA

SEQ ID NO: 1497 - protein, 10 aa, Artificial Sequence
  Description of Artificial Sequence: Synthetic peptide
QQIMEQLQSA

SEQ ID NO: 1498 - protein, 8 aa, Artificial Sequence
  Description of Artificial Sequence: Synthetic peptide
MHTDIISL

SEQ ID NO: 1499 - protein, 8 aa, Artificial Sequence
  Description of Artificial Sequence: Synthetic peptide
DRLHPVQA

SEQ ID NO: 1500 - protein, 9 aa, Artificial Sequence
  Description of Artificial Sequence: Synthetic peptide
AEVVQKVTM

SEQ ID NO: 1501 - protein, 9 aa, Artificial Sequence
  Description of Artificial Sequence: Synthetic peptide
AEVVQKVVM

SEQ ID NO: 1502 - protein, 10 aa, Artificial Sequence
  Description of Artificial Sequence: Synthetic peptide
AEGQGTGPTL

SEQ ID NO: 1503 - protein, 9 aa, Artificial Sequence
  Description of Artificial Sequence: Synthetic peptide
HEVIFNSTL

SEQ ID NO: 1504 - protein, 10 aa, Artificial Sequence
  Description of Artificial Sequence: Synthetic peptide
IEVKDTKEAL

SEQ ID NO: 1505 - protein, 10 aa, Artificial Sequence
  Description of Artificial Sequence: Synthetic peptide
TETTNQKTEL

SEQ ID NO: 1506 - protein, 9 aa, Artificial Sequence
  Description of Artificial Sequence: Synthetic peptide
QEINEQELL

SEQ ID NO: 1507 - protein, 9 aa, Artificial Sequence
  Description of Artificial Sequence: Synthetic peptide
MEDEEKEVL

SEQ ID NO: 1508 - protein, 10 aa, Artificial Sequence
  Description of Artificial Sequence: Synthetic peptide
REPAQPLVSL

SEQ ID NO: 1509 - protein, 10 aa, Artificial Sequence
  Description of Artificial Sequence: Synthetic peptide
KEQVPPLVSL

SEQ ID NO: 1510 - protein, 8 aa, Artificial Sequence
  Description of Artificial Sequence: Synthetic peptide
KEFNGTGL

SEQ ID NO: 1511 - protein, 9 aa, Artificial Sequence
  Description of Artificial Sequence: Synthetic peptide
KEISNYTNL

SEQ ID NO: 1512 - protein, 9 aa, Artificial Sequence
  Description of Artificial Sequence: Synthetic peptide
TEAENNSLL

SEQ ID NO: 1513 - protein, 9 aa, Artificial Sequence
  Description of Artificial Sequence: Synthetic peptide
SEGATPQDL

SEQ ID NO: 1514 - protein, 9 aa, Artificial Sequence
  Description of Artificial Sequence: Synthetic peptide
VELLGHSSL

SEQ ID NO: 1515 - protein, 8 aa, Artificial Sequence
  Description of Artificial Sequence: Synthetic peptide
IETVPVKL

SEQ ID NO: 1516 - protein, 9 aa, Artificial Sequence
  Description of Artificial Sequence: Synthetic peptide
IEGQLREAL

SEQ ID NO: 1517 - protein, 9 aa, Artificial Sequence
  Description of Artificial Sequence: Synthetic peptide
QEKNEQDLL

SEQ ID NO: 1518 - protein, 9 aa, Artificial Sequence
  Description of Artificial Sequence: Synthetic peptide
YDLGDINNL

SEQ ID NO: 1519 - protein, 9 aa, Artificial Sequence
  Description of Artificial Sequence: Synthetic peptide
YDLGDDNNL

SEQ ID NO: 1520 - protein, 8 aa, Artificial Sequence
  Description of Artificial Sequence: Synthetic peptide
IEAQQHML

SEQ ID NO: 1521 - protein, 9 aa, Artificial Sequence
  Description of Artificial Sequence: Synthetic peptide
YDLGNDINL

SEQ ID NO: 1522 - protein, 9 aa, Artificial Sequence
  Description of Artificial Sequence: Synthetic peptide
KEISNYTQI

SEQ ID NO: 1523 - protein, 10 aa, Artificial Sequence
  Description of Artificial Sequence: Synthetic peptide
AEHLKTAVQM

SEQ ID NO: 1524 - protein, 10 aa, Artificial Sequence
  Description of Artificial Sequence: Synthetic peptide
NESDGDREEL

SEQ ID NO: 1525 - protein, 10 aa, Artificial Sequence
  Description of Artificial Sequence: Synthetic peptide
AERQGPEPTF

SEQ ID NO: 1526 - protein, 8 aa, Artificial Sequence
  Description of Artificial Sequence: Synthetic peptide
IEAQQHLL

SEQ ID NO: 1527 - protein, 10 aa, Artificial Sequence
  Description of Artificial Sequence: Synthetic peptide
IEESQTQQEI

SEQ ID NO: 1528 - protein, 9 aa, Artificial Sequence
  Description of Artificial Sequence: Synthetic peptide
AEVVQKVTM

SEQ ID NO: 1529 - protein, 9 aa, Artificial Sequence
  Description of Artificial Sequence: Synthetic peptide
AEVVQKVVM

SEQ ID NO: 1530 - protein, 10 aa, Artificial Sequence
  Description of Artificial Sequence: Synthetic peptide
AEGQGTGPTL

SEQ ID NO: 1531 - protein, 9 aa, Artificial Sequence
  Description of Artificial Sequence: Synthetic peptide
HEVIFNSTL

SEQ ID NO: 1532 - protein, 9 aa, Artificial Sequence
  Description of Artificial Sequence: Synthetic peptide
YDLGDINNL

SEQ ID NO: 1533 - protein, 10 aa, Artificial Sequence
  Description of Artificial Sequence: Synthetic peptide
KEQVPPLVSL

SEQ ID NO: 1534 - protein, 10 aa, Artificial Sequence
  Description of Artificial Sequence: Synthetic peptide
AERQGTGPTF

SEQ ID NO: 1535 - protein, 10 aa, Artificial Sequence
  Description of Artificial Sequence: Synthetic peptide
TETTNQKTEL

SEQ ID NO: 1536 - protein, 9 aa, Artificial Sequence
  Description of Artificial Sequence: Synthetic peptide
YDLGNDINL

SEQ ID NO: 1537 - protein, 10 aa, Artificial Sequence
  Description of Artificial Sequence: Synthetic peptide
REPAQPLVSL

SEQ ID NO: 1538 - protein, 10 aa, Artificial Sequence
  Description of Artificial Sequence: Synthetic peptide
AERQGPEPTF

SEQ ID NO: 1539 - protein, 8 aa, Artificial Sequence
  Description of Artificial Sequence: Synthetic peptide
TDIQTREL

SEQ ID NO: 1540 - protein, 8 aa, Artificial Sequence
  Description of Artificial Sequence: Synthetic peptide
TDIQTKEL

SEQ ID NO: 1541 - protein, 8 aa, Artificial Sequence
  Description of Artificial Sequence: Synthetic peptide
IEAQQHML

SEQ ID NO: 1542 - protein, 10 aa, Artificial Sequence
  Description of Artificial Sequence: Synthetic peptide
AEHLKTAVQM

SEQ ID NO: 1543 - protein, 8 aa, Artificial Sequence
  Description of Artificial Sequence: Synthetic peptide
KEFNGTGL

SEQ ID NO: 1544 - protein, 10 aa, Artificial Sequence
  Description of Artificial Sequence: Synthetic peptide
VETGVGRTQV

SEQ ID NO: 1545 - protein, 10 aa, Artificial Sequence
  Description of Artificial Sequence: Synthetic peptide
VETGVGRPQV

SEQ ID NO: 1546 - protein, 10 aa, Artificial Sequence
  Description of Artificial Sequence: Synthetic peptide
AEHLRTAVQM

SEQ ID NO: 1547 - protein, 10 aa, Artificial Sequence
  Description of Artificial Sequence: Synthetic peptide
IEVKDTKEAL

SEQ ID NO: 1548 - protein, 8 aa, Artificial Sequence
  Description of Artificial Sequence: Synthetic peptide
AEVVQKVV

SEQ ID NO: 1549 - protein, 10 aa, Artificial Sequence
  Description of Artificial Sequence: Synthetic peptide
GEIIGDIRKA

SEQ ID NO: 1550 - protein, 9 aa, Artificial Sequence
  Description of Artificial Sequence: Synthetic peptide
VELLGHSSL

SEQ ID NO: 1551 - protein, 8 aa, Artificial Sequence
  Description of Artificial Sequence: Synthetic peptide
IETVPVKL

SEQ ID NO: 1552 - protein, 9 aa, Artificial Sequence
  Description of Artificial Sequence: Synthetic peptide
TEPVNITCI

SEQ ID NO: 1553 - protein, 9 aa, Artificial Sequence
  Description of Artificial Sequence: Synthetic peptide
SERVLSASL

SEQ ID NO: 1554 - protein, 10 aa, Artificial Sequence
  Description of Artificial Sequence: Synthetic peptide
TETGVGRPQV

SEQ ID NO: 1555 - protein, 8 aa, Artificial Sequence
  Description of Artificial Sequence: Synthetic peptide
VEAIIRTL

SEQ ID NO: 1556 - protein, 9 aa, Artificial Sequence
  Description of Artificial Sequence: Synthetic peptide
SERVLSTCL

SEQ ID NO: 1557 - protein, 9 aa, Artificial Sequence
  Description of Artificial Sequence: Synthetic peptide
QEINEQELL

SEQ ID NO: 1558 - protein, 9 aa, Artificial Sequence
  Description of Artificial Sequence: Synthetic peptide
GEVGFPVRP

SEQ ID NO: 1559 - protein, 9 aa, Artificial Sequence
  Description of Artificial Sequence: Synthetic peptide
IEGQLREAL

SEQ ID NO: 1560 - protein, 8 aa, Artificial Sequence
  Description of Artificial Sequence: Synthetic peptide
SDLQTKEL

SEQ ID NO: 1561 - protein, 8 aa, Artificial Sequence
  Description of Artificial Sequence: Synthetic peptide
IEAQQHLL

SEQ ID NO: 1562 - protein, 9 aa, Artificial Sequence
  Description of Artificial Sequence: Synthetic peptide
SERILSTCL

SEQ ID NO: 1563 - protein, 11 aa, Artificial Sequence
  Description of Artificial Sequence: Synthetic peptide
GDYDLGDDNNL

SEQ ID NO: 1564 - protein, 8 aa, Artificial Sequence
  Description of Artificial Sequence: Synthetic peptide
HEVIFNST

SEQ ID NO: 1565 - protein, 8 aa, Artificial Sequence
  Description of Artificial Sequence: Synthetic peptide
TDRVIETV

SEQ ID NO: 1566 - protein, 8 aa, Artificial Sequence
  Description of Artificial Sequence: Synthetic peptide
KENIIVQL

SEQ ID NO: 1567 - protein, 8 aa, Artificial Sequence
  Description of Artificial Sequence: Synthetic peptide
YDTIAIAV

SEQ ID NO: 1568 - protein, 9 aa, Artificial Sequence
  Description of Artificial Sequence: Synthetic peptide
SEGATPQDL

SEQ ID NO: 1569 - protein, 9 aa, Artificial Sequence
  Description of Artificial Sequence: Synthetic peptide
KEISNYTNL

SEQ ID NO: 1570 - protein, 11 aa, Artificial Sequence
  Description of Artificial Sequence: Synthetic peptide
QEINEQELLAL

SEQ ID NO: 1571 - protein, 8 aa, Artificial Sequence
  Description of Artificial Sequence: Synthetic peptide
IEITTHSF

SEQ ID NO: 1572 - protein, 9 aa, Artificial Sequence
  Description of Artificial Sequence: Synthetic peptide
YDLGDDNNL

SEQ ID NO: 1573 - protein, 11 aa, Artificial Sequence
  Description of Artificial Sequence: Synthetic peptide
SELVSQIIEKL

SEQ ID NO: 1574 - protein, 9 aa, Artificial Sequence
  Description of Artificial Sequence: Synthetic peptide
LEKDPIVGA

SEQ ID NO: 1575 - protein, 11 aa, Artificial Sequence
  Description of Artificial Sequence: Synthetic peptide
VEAIIRTLQQL

SEQ ID NO: 1576 - protein, 9 aa, Artificial Sequence
  Description of Artificial Sequence: Synthetic peptide
SESELVNQI

SEQ ID NO: 1577 - protein, 9 aa, Artificial Sequence
  Description of Artificial Sequence: Synthetic peptide
GEVGFPVRP

SEQ ID NO: 1578 - protein, 10 aa, Artificial Sequence
  Description of Artificial Sequence: Synthetic peptide
GEIIGDIRKA

SEQ ID NO: 1579 - protein, 9 aa, Artificial Sequence
  Description of Artificial Sequence: Synthetic peptide
LEKDPIVGA

SEQ ID NO: 1580 - protein, 9 aa, Artificial Sequence
  Description of Artificial Sequence: Synthetic peptide
TETLLIQNA

SEQ ID NO: 1581 - protein, 9 aa, Artificial Sequence
  Description of Artificial Sequence: Synthetic peptide
LEKDPIAGA

SEQ ID NO: 1582 - protein, 9 aa, Artificial Sequence
  Description of Artificial Sequence: Synthetic peptide
KEFNGTGLC

SEQ ID NO: 1583 - protein, 9 aa, Artificial Sequence
  Description of Artificial Sequence: Synthetic peptide
TETLLVQNA

SEQ ID NO: 1584 - protein, 9 aa, Artificial Sequence
  Description of Artificial Sequence: Synthetic peptide
EEVGFPVRP

SEQ ID NO: 1585 - protein, 9 aa, Artificial Sequence
  Description of Artificial Sequence: Synthetic peptide
IEVKDTKEA

SEQ ID NO: 1586 - protein, 9 aa, Artificial Sequence
  Description of Artificial Sequence: Synthetic peptide
QEFGIPYNP

SEQ ID NO: 1587 - protein, 8 aa, Artificial Sequence
  Description of Artificial Sequence: Synthetic peptide
RDFILIAA

SEQ ID NO: 1588 - protein, 8 aa, Artificial Sequence
  Description of Artificial Sequence: Synthetic peptide
AEVVQKVV

SEQ ID NO: 1589 - protein, 8 aa, Artificial Sequence
  Description of Artificial Sequence: Synthetic peptide
TDRVIETV

SEQ ID NO: 1590 - protein, 9 aa, Artificial Sequence
  Description of Artificial Sequence: Synthetic peptide
GENNSLLHP

SEQ ID NO: 1591 - protein, 8 aa, Artificial Sequence
  Description of Artificial Sequence: Synthetic peptide
HEVIFNST

SEQ ID NO: 1592 - protein, 9 aa, Artificial Sequence
  Description of Artificial Sequence: Synthetic peptide
SEQTGAISP

SEQ ID NO: 1593 - protein, 8 aa, Artificial Sequence
  Description of Artificial Sequence: Synthetic peptide
AETTLFCA

SEQ ID NO: 1594 - protein, 9 aa, Artificial Sequence
  Description of Artificial Sequence: Synthetic peptide
AEVVQKVTM

SEQ ID NO: 1595 - protein, 9 aa, Artificial Sequence
  Description of Artificial Sequence: Synthetic peptide
AEVVQKVVM

SEQ ID NO: 1596 - protein, 10 aa, Artificial Sequence
  Description of Artificial Sequence: Synthetic peptide
AERQGTGPTF

SEQ ID NO: 1597 - protein, 10 aa, Artificial Sequence
  Description of Artificial Sequence: Synthetic peptide
AERQGPEPTF

SEQ ID NO: 1598 - protein, 9 aa, Artificial Sequence
  Description of Artificial Sequence: Synthetic peptide
HEVIFNSTL

SEQ ID NO: 1599 - protein, 10 aa, Artificial Sequence
  Description of Artificial Sequence: Synthetic peptide
AEGQGTGPTL

SEQ ID NO: 1600 - protein, 8 aa, Artificial Sequence
  Description of Artificial Sequence: Synthetic peptide
TDIQTKEL

SEQ ID NO: 1601 - protein, 9 aa, Artificial Sequence
  Description of Artificial Sequence: Synthetic peptide
SERVLSASL

SEQ ID NO: 1602 - protein, 8 aa, Artificial Sequence
  Description of Artificial Sequence: Synthetic peptide
AEVVQKVV

SEQ ID NO: 1603 - protein, 9 aa, Artificial Sequence
  Description of Artificial Sequence: Synthetic peptide
SERVLSTCL

SEQ ID NO: 1604 - protein, 8 aa, Artificial Sequence
  Description of Artificial Sequence: Synthetic peptide
TDIQTREL

SEQ ID NO: 1605 - protein, 8 aa, Artificial Sequence
  Description of Artificial Sequence: Synthetic peptide
IEAQQHML

SEQ ID NO: 1606 - protein, 9 aa, Artificial Sequence
  Description of Artificial Sequence: Synthetic peptide
SERILSTCL

SEQ ID NO: 1607 - protein, 8 aa, Artificial Sequence
  Description of Artificial Sequence: Synthetic peptide
AEHLRTAV

SEQ ID NO: 1608 - protein, 8 aa, Artificial Sequence
  Description of Artificial Sequence: Synthetic peptide
AEHLKTAV

SEQ ID NO: 1609 - protein, 10 aa, Artificial Sequence
  Description of Artificial Sequence: Synthetic peptide
KEQVPPLVSL

SEQ ID NO: 1610 - protein, 8 aa, Artificial Sequence
  Description of Artificial Sequence: Synthetic peptide
SDLQTKEL

SEQ ID NO: 1611 - protein, 9 aa, Artificial Sequence
  Description of Artificial Sequence: Synthetic peptide
GEQDRGRSI

SEQ ID NO: 1612 - protein, 8 aa, Artificial Sequence
  Description of Artificial Sequence: Synthetic peptide
KEFNGTGL

SEQ ID NO: 1613 - protein, 9 aa, Artificial Sequence
  Description of Artificial Sequence: Synthetic peptide
IEGQLREAL

SEQ ID NO: 1614 - protein, 10 aa, Artificial Sequence
  Description of Artificial Sequence: Synthetic peptide
AEHLRTAVQM

SEQ ID NO: 1615 - protein, 9 aa, Artificial Sequence
  Description of Artificial Sequence: Synthetic peptide
QEINEQELL

SEQ ID NO: 1616 - protein, 10 aa, Artificial Sequence
  Description of Artificial Sequence: Synthetic peptide
TETTNQKTEL

SEQ ID NO: 1617 - protein, 8 aa, Artificial Sequence
  Description of Artificial Sequence: Synthetic peptide
VEAIIRTL

SEQ ID NO: 1618 - protein, 9 aa, Artificial Sequence
  Description of Artificial Sequence: Synthetic peptide
VELLGHSSL

SEQ ID NO: 1619 - protein, 8 aa, Artificial Sequence
  Description of Artificial Sequence: Synthetic peptide
IEAQQHLL

SEQ ID NO: 1620 - protein, 9 aa, Artificial Sequence
  Description of Artificial Sequence: Synthetic peptide
QEKNEQDLL

SEQ ID NO: 1621 - protein, 10 aa, Artificial Sequence
  Description of Artificial Sequence: Synthetic peptide
REPAQPLVSL

SEQ ID NO: 1622 - protein, 10 aa, Artificial Sequence
  Description of Artificial Sequence: Synthetic peptide
VETGVGRTQV

SEQ ID NO: 1623 - protein, 8 aa, Artificial Sequence
  Description of Artificial Sequence: Synthetic peptide
IEKDKVYL

SEQ ID NO: 1624 - protein, 8 aa, Artificial Sequence
  Description of Artificial Sequence: Synthetic peptide
KENIIVQL

SEQ ID NO: 1625 - protein, 8 aa, Artificial Sequence
  Description of Artificial Sequence: Synthetic peptide
TDRVIETV

SEQ ID NO: 1626 - protein, 8 aa, Artificial Sequence
  Description of Artificial Sequence: Synthetic peptide
GQMIHQSL

SEQ ID NO: 1627 - protein, 10 aa, Artificial Sequence
  Description of Artificial Sequence: Synthetic peptide
AEHLKTAVQM

SEQ ID NO: 1628 - protein, 9 aa, Artificial Sequence
  Description of Artificial Sequence: Synthetic peptide
YDLGDINNL

SEQ ID NO: 1629 - protein, 8 aa, Artificial Sequence
  Description of Artificial Sequence: Synthetic peptide
TERQANFL

SEQ ID NO: 1630 - protein, 9 aa, Artificial Sequence
  Description of Artificial Sequence: Synthetic peptide
MEDEEKEVL

SEQ ID NO: 1631 - protein, 8 aa, Artificial Sequence
  Description of Artificial Sequence: Synthetic peptide
IEITTHSF

SEQ ID NO: 1632 - protein, 9 aa, Artificial Sequence
  Description of Artificial Sequence: Synthetic peptide
LEKDPIVGA

SEQ ID NO: 1633 - protein, 8 aa, Artificial Sequence
  Description of Artificial Sequence: Synthetic peptide
AEVVQKVT

SEQ ID NO: 1634 - protein, 8 aa, Artificial Sequence
  Description of Artificial Sequence: Synthetic peptide
IEQLQPSV

SEQ ID NO: 1635 - protein, 8 aa, Artificial Sequence
  Description of Artificial Sequence: Synthetic peptide
MEQLQSAL

SEQ ID NO: 1636 - protein, 9 aa, Artificial Sequence
  Description of Artificial Sequence: Synthetic peptide
KEKGGLDGL

SEQ ID NO: 1637 - protein, 8 aa, Artificial Sequence
  Description of Artificial Sequence: Synthetic peptide
KEQVPPLV

SEQ ID NO: 1638 - protein, 8 aa, Artificial Sequence
  Description of Artificial Sequence: Synthetic peptide
IEMGNYDL

SEQ ID NO: 1639 - protein, 9 aa, Artificial Sequence
  Description of Artificial Sequence: Synthetic peptide
SEMEKEGKI

SEQ ID NO: 1640 - protein, 9 aa, Artificial Sequence
  Description of Artificial Sequence: Synthetic peptide
KDREPAQPL

SEQ ID NO: 1641 - protein, 9 aa, Artificial Sequence
  Description of Artificial Sequence: Synthetic peptide
SEQTRTNSP

SEQ ID NO: 1642 - protein, 9 aa, Artificial Sequence
  Description of Artificial Sequence: Synthetic peptide
KEISNYTNL

SEQ ID NO: 1643 - protein, 11 aa, Artificial Sequence
  Description of Artificial Sequence: Synthetic peptide
AEQATQEVKSW

SEQ ID NO: 1644 - protein, 11 aa, Artificial Sequence
  Description of Artificial Sequence: Synthetic peptide
AEQATQDVKHW

SEQ ID NO: 1645 - protein, 11 aa, Artificial Sequence
  Description of Artificial Sequence: Synthetic peptide
AEQATQEVKGW

SEQ ID NO: 1646 - protein, 11 aa, Artificial Sequence
  Description of Artificial Sequence: Synthetic peptide
SEVNIVTDSQY

SEQ ID NO: 1647 - protein, 9 aa, Artificial Sequence
  Description of Artificial Sequence: Synthetic peptide
AENLWVTVY

SEQ ID NO: 1648 - protein, 9 aa, Artificial Sequence
  Description of Artificial Sequence: Synthetic peptide
AEVVQKVTM

SEQ ID NO: 1649 - protein, 11 aa, Artificial Sequence
  Description of Artificial Sequence: Synthetic peptide
AEIQKQGQDQW

SEQ ID NO: 1650 - protein, 9 aa, Artificial Sequence
  Description of Artificial Sequence: Synthetic peptide
AEQRWVTVY

SEQ ID NO: 1651 - protein, 10 aa, Artificial Sequence
  Description of Artificial Sequence: Synthetic peptide
AERQGPEPTF

SEQ ID NO: 1652 - protein, 10 aa, Artificial Sequence
  Description of Artificial Sequence: Synthetic peptide
AERQGTGPTF

SEQ ID NO: 1653 - protein, 10 aa, Artificial Sequence
  Description of Artificial Sequence: Synthetic peptide
AEGQGTGPTL

SEQ ID NO: 1654 - protein, 9 aa, Artificial Sequence
  Description of Artificial Sequence: Synthetic peptide
AEVVQKVVM

SEQ ID NO: 1655 - protein, 11 aa, Artificial Sequence
  Description of Artificial Sequence: Synthetic peptide
NEQDLLALDKW

SEQ ID NO: 1656 - protein, 10 aa, Artificial Sequence
  Description of Artificial Sequence: Synthetic peptide
NETPGTRYQY

SEQ ID NO: 1657 - protein, 9 aa, Artificial Sequence
  Description of Artificial Sequence: Synthetic peptide
IELPEKESW

SEQ ID NO: 1658 - protein, 9 aa, Artificial Sequence
  Description of Artificial Sequence: Synthetic peptide
SEIWENMTW

SEQ ID NO: 1659 - protein, 10 aa, Artificial Sequence
  Description of Artificial Sequence: Synthetic peptide
NETPGIRYQY

SEQ ID NO: 1660 - protein, 9 aa, Artificial Sequence
  Description of Artificial Sequence: Synthetic peptide
QELLALDKW

SEQ ID NO: 1661 - protein, 9 aa, Artificial Sequence
  Description of Artificial Sequence: Synthetic peptide
YETEKHNVW

SEQ ID NO: 1662 - protein, 9 aa, Artificial Sequence
  Description of Artificial Sequence: Synthetic peptide
AETGQETAY

SEQ ID NO: 1663 - protein, 11 aa, Artificial Sequence
  Description of Artificial Sequence: Synthetic peptide
NEQELLALDKW

SEQ ID NO: 1664 - protein, 11 aa, Artificial Sequence
  Description of Artificial Sequence: Synthetic peptide
SEVNIVTDSQY

SEQ ID NO: 1665 - protein, 11 aa, Artificial Sequence
  Description of Artificial Sequence: Synthetic peptide
AEQATQEVKSW

SEQ ID NO: 1666 - protein, 11 aa, Artificial Sequence
  Description of Artificial Sequence: Synthetic peptide
AEQATQEVKGW

SEQ ID NO: 1667 - protein, 11 aa, Artificial Sequence
  Description of Artificial Sequence: Synthetic peptide
AEQATQDVKHW

SEQ ID NO: 1668 - protein, 9 aa, Artificial Sequence
  Description of Artificial Sequence: Synthetic peptide
AEVVQKVTM

SEQ ID NO: 1669 - protein, 11 aa, Artificial Sequence
  Description of Artificial Sequence: Synthetic peptide
AEIQKQGQDQW

SEQ ID NO: 1670 - protein, 9 aa, Artificial Sequence
  Description of Artificial Sequence: Synthetic peptide
AEVVQKVVM

SEQ ID NO: 1671 - protein, 9 aa, Artificial Sequence
  Description of Artificial Sequence: Synthetic peptide
AENLWVTVY

SEQ ID NO: 1672 - protein, 10 aa, Artificial Sequence
  Description of Artificial Sequence: Synthetic peptide
NETPGIRYQY

SEQ ID NO: 1673 - protein, 10 aa, Artificial Sequence
  Description of Artificial Sequence: Synthetic peptide
NETPGTRYQY

SEQ ID NO: 1674 - protein, 10 aa, Artificial Sequence
  Description of Artificial Sequence: Synthetic peptide
AERQGTGPTF

SEQ ID NO: 1675 - protein, 10 aa, Artificial Sequence
  Description of Artificial Sequence: Synthetic peptide
AEGQGTGPTL

SEQ ID NO: 1676 - protein, 9 aa, Artificial Sequence
  Description of Artificial Sequence: Synthetic peptide
IELPEKESW

SEQ ID NO: 1677 - protein, 10 aa, Artificial Sequence
  Description of Artificial Sequence: Synthetic peptide
AERQGPEPTF

SEQ ID NO: 1678 - protein, 11 aa, Artificial Sequence
  Description of Artificial Sequence: Synthetic peptide
NEQDLLALDKW

SEQ ID NO: 1679 - protein, 9 aa, Artificial Sequence
  Description of Artificial Sequence: Synthetic peptide
SEMEKEGKI

SEQ ID NO: 1680 - protein, 9 aa, Artificial Sequence
  Description of Artificial Sequence: Synthetic peptide
SESELVNQI

SEQ ID NO: 1681 - protein, 9 aa, Artificial Sequence
  Description of Artificial Sequence: Synthetic peptide
SEIWENMTW

SEQ ID NO: 1682 - protein, 9 aa, Artificial Sequence
  Description of Artificial Sequence: Synthetic peptide
YETEKHNVW

SEQ ID NO: 1683 - protein, 9 aa, Artificial Sequence
  Description of Artificial Sequence: Synthetic peptide
AEQRWVTVY

SEQ ID NO: 1684 - protein, 9 aa, Artificial Sequence
  Description of Artificial Sequence: Synthetic peptide
QELLALDKW

SEQ ID NO: 1685 - protein, 9 aa, Artificial Sequence
  Description of Artificial Sequence: Synthetic peptide
SEIWDKMTW

SEQ ID NO: 1686 - protein, 11 aa, Artificial Sequence
  Description of Artificial Sequence: Synthetic peptide
TETTNQKTELY

SEQ ID NO: 1687 - protein, 11 aa, Artificial Sequence
  Description of Artificial Sequence: Synthetic peptide
NEQELLALDKW

SEQ ID NO: 1688 - protein, 11 aa, Artificial Sequence
  Description of Artificial Sequence: Synthetic peptide
QELKISAVNLY

SEQ ID NO: 1689 - protein, 9 aa, Artificial Sequence
  Description of Artificial Sequence: Synthetic peptide
AETGQETAY

SEQ ID NO: 1690 - protein, 9 aa, Artificial Sequence
  Description of Artificial Sequence: Synthetic peptide
TENLWVTVY

SEQ ID NO: 1691 - protein, 9 aa, Artificial Sequence
  Description of Artificial Sequence: Synthetic peptide
SESELVSQI

SEQ ID NO: 1692 - protein, 10 aa, Artificial Sequence
  Description of Artificial Sequence: Synthetic peptide
AETGQETAYF

SEQ ID NO: 1693 - protein, 9 aa, Artificial Sequence
  Description of Artificial Sequence: Synthetic peptide
DEIWENMTW

SEQ ID NO: 1694 - protein, 8 aa, Artificial Sequence
  Description of Artificial Sequence: Synthetic peptide
NETPGIRY

SEQ ID NO: 1695 - protein, 9 aa, Artificial Sequence
  Description of Artificial Sequence: Synthetic peptide
YDTEVHNVW

SEQ ID NO: 1696 - protein, 9 aa, Artificial Sequence
  Description of Artificial Sequence: Synthetic peptide
HEVIFNSTL

SEQ ID NO: 1697 - protein, 11 aa, Artificial Sequence
  Description of Artificial Sequence: Synthetic peptide
MEDEEKEVLKW

SEQ ID NO: 1698 - protein, 9 aa, Artificial Sequence
  Description of Artificial Sequence: Synthetic peptide
AEVVQKVTM

SEQ ID NO: 1699 - protein, 10 aa, Artificial Sequence
  Description of Artificial Sequence: Synthetic peptide
AEGQGTGPTL

SEQ ID NO: 1700 - protein, 10 aa, Artificial Sequence
  Description of Artificial Sequence: Synthetic peptide
AERQGTGPTF

SEQ ID NO: 1701 - protein, 9 aa, Artificial Sequence
  Description of Artificial Sequence: Synthetic peptide
AEVVQKVVM

SEQ ID NO: 1702 - protein, 10 aa, Artificial Sequence
  Description of Artificial Sequence: Synthetic peptide
AERQGPEPTF

SEQ ID NO: 1703 - protein, 11 aa, Artificial Sequence
  Description of Artificial Sequence: Synthetic peptide
AEQATQEVKSW

SEQ ID NO: 1704 - protein, 11 aa, Artificial Sequence
  Description of Artificial Sequence: Synthetic peptide
AEQATQEVKGW

SEQ ID NO: 1705 - protein, 11 aa, Artificial Sequence
  Description of Artificial Sequence: Synthetic peptide
AEIQKQGQDQW

SEQ ID NO: 1706 - protein, 10 aa, Artificial Sequence
  Description of Artificial Sequence: Synthetic peptide
KEQVPPLVSL

SEQ ID NO: 1707 - protein, 11 aa, Artificial Sequence
  Description of Artificial Sequence: Synthetic peptide
AEQATQDVKHW

SEQ ID NO: 1708 - protein, 11 aa, Artificial Sequence
  Description of Artificial Sequence: Synthetic peptide
SEVNIVTDSQY

SEQ ID NO: 1709 - protein, 10 aa, Artificial Sequence
  Description of Artificial Sequence: Synthetic peptide
AETGQETAYF

SEQ ID NO: 1710 - protein, 10 aa, Artificial Sequence
  Description of Artificial Sequence: Synthetic peptide
TETTNQKTEL

SEQ ID NO: 1711 - protein, 9 aa, Artificial Sequence
  Description of Artificial Sequence: Synthetic peptide
QEINEQELL

SEQ ID NO: 1712 - protein, 9 aa, Artificial Sequence
  Description of Artificial Sequence: Synthetic peptide
SEMEKEGKI

SEQ ID NO: 1713 - protein, 9 aa, Artificial Sequence
  Description of Artificial Sequence: Synthetic peptide
YDLGDINNL

SEQ ID NO: 1714 - protein, 11 aa, Artificial Sequence
  Description of Artificial Sequence: Synthetic peptide
AELELAENREI

SEQ ID NO: 1715 - protein, 10 aa, Artificial Sequence
  Description of Artificial Sequence: Synthetic peptide
QELKISAVNL

SEQ ID NO: 1716 - protein, 9 aa, Artificial Sequence
  Description of Artificial Sequence: Synthetic peptide
HEVIFNSTL

SEQ ID NO: 1717 - protein, 10 aa, Artificial Sequence
  Description of Artificial Sequence: Synthetic peptide
AEHLKTAVQM

SEQ ID NO: 1718 - protein, 9 aa, Artificial Sequence
  Description of Artificial Sequence: Synthetic peptide
SESELVNQI

SEQ ID NO: 1719 - protein, 10 aa, Artificial Sequence
  Description of Artificial Sequence: Synthetic peptide
AEHLRTAVQM

SEQ ID NO: 1720 - protein, 9 aa, Artificial Sequence
  Description of Artificial Sequence: Synthetic peptide
GEQDRGRSI

SEQ ID NO: 1721 - protein, 10 aa, Artificial Sequence
  Description of Artificial Sequence: Synthetic peptide
REPAQPLVSL

SEQ ID NO: 1722 - protein, 10 aa, Artificial Sequence
  Description of Artificial Sequence: Synthetic peptide
GDIEITTHSF

SEQ ID NO: 1723 - protein, 10 aa, Artificial Sequence
  Description of Artificial Sequence: Synthetic peptide
RDQNPPSVSL

SEQ ID NO: 1724 - protein, 9 aa, Artificial Sequence
  Description of Artificial Sequence: Synthetic peptide
TEAENNSLL

SEQ ID NO: 1725 - protein, 9 aa, Artificial Sequence
  Description of Artificial Sequence: Synthetic peptide
SERVLSASL

SEQ ID NO: 1726 - protein, 9 aa, Artificial Sequence
  Description of Artificial Sequence: Synthetic peptide
SEGATPQDL

SEQ ID NO: 1727 - protein, 10 aa, Artificial Sequence
  Description of Artificial Sequence: Synthetic peptide
AEIFGIGEEI

SEQ ID NO: 1728 - protein, 11 aa, Artificial Sequence
  Description of Artificial Sequence: Synthetic peptide
SENITNNVKTI

SEQ ID NO: 1729 - protein, 11 aa, Artificial Sequence
  Description of Artificial Sequence: Synthetic peptide
SELVNQIIEKL

SEQ ID NO: 1730 - protein, 9 aa, Artificial Sequence
  Description of Artificial Sequence: Synthetic peptide
SESELVSQI

SEQ ID NO: 1731 - protein, 9 aa, Artificial Sequence
  Description of Artificial Sequence: Synthetic peptide
EESQTQQEI

SEQ ID NO: 1732 - protein, 9 aa, Artificial Sequence
  Description of Artificial Sequence: Synthetic peptide
KEISNYTQI

SEQ ID NO: 1733 - protein, 9 aa, Artificial Sequence
  Description of Artificial Sequence: Synthetic peptide
KEISNYTNL

SEQ ID NO: 1734 - protein, 11 aa, Artificial Sequence
  Description of Artificial Sequence: Synthetic peptide
SELVSQIIEKL

SEQ ID NO: 1735 - protein, 9 aa, Artificial Sequence
  Description of Artificial Sequence: Synthetic peptide
QEKNEQDLL

SEQ ID NO: 1736 - protein, 9 aa, Artificial Sequence
  Description of Artificial Sequence: Synthetic peptide
YDLGNDINL

SEQ ID NO: 1737 - protein, 9 aa, Artificial Sequence
  Description of Artificial Sequence: Synthetic peptide
SERVLSTCL

SEQ ID NO: 1738 - protein, 10 aa, Artificial Sequence
  Description of Artificial Sequence: Synthetic peptide
GDPEVTTHSF

SEQ ID NO: 1739 - protein, 9 aa, Artificial Sequence
  Description of Artificial Sequence: Synthetic peptide
IELPEKESW

SEQ ID NO: 1740 - protein, 9 aa, Artificial Sequence
  Description of Artificial Sequence: Synthetic peptide
VELLGHSSL

SEQ ID NO: 1741 - protein, 8 aa, Artificial Sequence
  Description of Artificial Sequence: Synthetic peptide
EEIKNCSF

SEQ ID NO: 1742 - protein, 11 aa, Artificial Sequence
  Description of Artificial Sequence: Synthetic peptide
LEAQEEGEVGF

SEQ ID NO: 1743 - protein, 10 aa, Artificial Sequence
  Description of Artificial Sequence: Synthetic peptide
VETGVGRTQV

SEQ ID NO: 1744 - protein, 9 aa, Artificial Sequence
  Description of Artificial Sequence: Synthetic peptide
AEQRWVTVY

SEQ ID NO: 1745 - protein, 9 aa, Artificial Sequence
  Description of Artificial Sequence: Synthetic peptide
MESAEADRF

SEQ ID NO: 1746 - protein, 10 aa, Artificial Sequence
  Description of Artificial Sequence: Synthetic peptide
ILKDPVHGAY

SEQ ID NO: 1747 - protein, 9 aa, Artificial Sequence
  Description of Artificial Sequence: Synthetic peptide
SIVTRTVEL

SEQ ID NO: 1748 - protein, 10 aa, Artificial Sequence
  Description of Artificial Sequence: Synthetic peptide
ILKEPVHGVY

SEQ ID NO: 1749 - protein, 10 aa, Artificial Sequence
  Description of Artificial Sequence: Synthetic peptide
SIRIGPGQSF

SEQ ID NO: 1750 - protein, 9 aa, Artificial Sequence
  Description of Artificial Sequence: Synthetic peptide
RAVGIGAVF

SEQ ID NO: 1751 - protein, 9 aa, Artificial Sequence
  Description of Artificial Sequence: Synthetic peptide
FLGTAGSTM

SEQ ID NO: 1752 - protein, 9 aa, Artificial Sequence
  Description of Artificial Sequence: Synthetic peptide
TLNNNTIEM

SEQ ID NO: 1753 - protein, 8 aa, Artificial Sequence
  Description of Artificial Sequence: Synthetic peptide
GQMIHQSL

SEQ ID NO: 1754 - protein, 9 aa, Artificial Sequence
  Description of Artificial Sequence: Synthetic peptide
YDLGDINNL

SEQ ID NO: 1755 - protein, 8 aa, Artificial Sequence
  Description of Artificial Sequence: Synthetic peptide
GQGTGPTL

SEQ ID NO: 1756 - protein, 11 aa, Artificial Sequence
  Description of Artificial Sequence: Synthetic peptide
GDYDLGDDNNL

SEQ ID NO: 1757 - protein, 9 aa, Artificial Sequence
  Description of Artificial Sequence: Synthetic peptide
GCQKIIEQL

SEQ ID NO: 1758 - protein, 9 aa, Artificial Sequence
  Description of Artificial Sequence: Synthetic peptide
KALTDIVTL

SEQ ID NO: 1759 - protein, 11 aa, Artificial Sequence
  Description of Artificial Sequence: Synthetic peptide
GNYDLGDINNL

SEQ ID NO: 1760 - protein, 10 aa, Artificial Sequence
  Description of Artificial Sequence: Synthetic peptide
AQGQMIHQSL

SEQ ID NO: 1761 - protein, 9 aa, Artificial Sequence
  Description of Artificial Sequence: Synthetic peptide
GKKAIGTVL

SEQ ID NO: 1762 - protein, 9 aa, Artificial Sequence
  Description of Artificial Sequence: Synthetic peptide
YDLGDDNNL

SEQ ID NO: 1763 - protein, 11 aa, Artificial Sequence
  Description of Artificial Sequence: Synthetic peptide
GNYDLGNDINL

SEQ ID NO: 1764 - protein, 8 aa, Artificial Sequence
  Description of Artificial Sequence: Synthetic peptide
HQAAMQML

SEQ ID NO: 1765 - protein, 9 aa, Artificial Sequence
  Description of Artificial Sequence: Synthetic peptide
KALTDVVTL

SEQ ID NO: 1766 - protein, 9 aa, Artificial Sequence
  Description of Artificial Sequence: Synthetic peptide
EQVPPLVSL

SEQ ID NO: 1767 - protein, 9 aa, Artificial Sequence
  Description of Artificial Sequence: Synthetic peptide
KDFNGTGPC

SEQ ID NO: 1768 - protein, 9 aa, Artificial Sequence
  Description of Artificial Sequence: Synthetic peptide
IKPVVSTQL

SEQ ID NO: 1769 - protein, 9 aa, Artificial Sequence
  Description of Artificial Sequence: Synthetic peptide
RALGAGATL

SEQ ID NO: 1770 - protein, 9 aa, Artificial Sequence
  Description of Artificial Sequence: Synthetic peptide
KALGSGATL

SEQ ID NO: 1771 - protein, 9 aa, Artificial Sequence
  Description of Artificial Sequence: Synthetic peptide
SQVQHTNIM

SEQ ID NO: 1772 - protein, 9 aa, Artificial Sequence
  Description of Artificial Sequence: Synthetic peptide
RAIEAQQHL

SEQ ID NO: 1773 - protein, 9 aa, Artificial Sequence
  Description of Artificial Sequence: Synthetic peptide
IKPVVTTQL

SEQ ID NO: 1774 - protein, 8 aa, Artificial Sequence
  Description of Artificial Sequence: Synthetic peptide
RQRQIDTL

SEQ ID NO: 1775 - protein, 11 aa, Artificial Sequence
  Description of Artificial Sequence: Synthetic peptide
GAEGQGTGPTL

SEQ ID NO: 1776 - protein, 9 aa, Artificial Sequence
  Description of Artificial Sequence: Synthetic peptide
SQVQHPNIM

SEQ ID NO: 1777 - protein, 11 aa, Artificial Sequence
  Description of Artificial Sequence: Synthetic peptide
TQIDPDQADQL

SEQ ID NO: 1778 - protein, 11 aa, Artificial Sequence
  Description of Artificial Sequence: Synthetic peptide
TQIDPDLADQL

SEQ ID NO: 1779 - protein, 10 aa, Artificial Sequence
  Description of Artificial Sequence: Synthetic peptide
AQGQMIYQSM

SEQ ID NO: 1780 - protein, 10 aa, Artificial Sequence
  Description of Artificial Sequence: Synthetic peptide
SLFGNDPLSQ

SEQ ID NO: 1781 - protein, 8 aa, Artificial Sequence
  Description of Artificial Sequence: Synthetic peptide
KQLQARVL

SEQ ID NO: 1782 - protein, 9 aa, Artificial Sequence
  Description of Artificial Sequence: Synthetic peptide
RALGTGATL

SEQ ID NO: 1783 - protein, 9 aa, Artificial Sequence
  Description of Artificial Sequence: Synthetic peptide
YDLGNDINL

SEQ ID NO: 1784 - protein, 8 aa, Artificial Sequence
  Description of Artificial Sequence: Synthetic peptide
SYNITTEL

SEQ ID NO: 1785 - protein, 8 aa, Artificial Sequence
  Description of Artificial Sequence: Synthetic peptide
KKAIGTVL

SEQ ID NO: 1786 - protein, 9 aa, Artificial Sequence
  Description of Artificial Sequence: Synthetic peptide
HEVIFNSTL

SEQ ID NO: 1787 - protein, 10 aa, Artificial Sequence
  Description of Artificial Sequence: Synthetic peptide
VETGVGRTQV

SEQ ID NO: 1788 - protein, 9 aa, Artificial Sequence
  Description of Artificial Sequence: Synthetic peptide
TEPVNITCI

SEQ ID NO: 1789 - protein, 9 aa, Artificial Sequence
  Description of Artificial Sequence: Synthetic peptide
KEISNYTQI

SEQ ID NO: 1790 - protein, 9 aa, Artificial Sequence
  Description of Artificial Sequence: Synthetic peptide
SESELVNQI

SEQ ID NO: 1791 - protein, 9 aa, Artificial Sequence
  Description of Artificial Sequence: Synthetic peptide
YELIEESQI

SEQ ID NO: 1792 - protein, 9 aa, Artificial Sequence
  Description of Artificial Sequence: Synthetic peptide
SESELVSQI

SEQ ID NO: 1793 - protein, 9 aa, Artificial Sequence
  Description of Artificial Sequence: Synthetic peptide
AEVVQKVTM

SEQ ID NO: 1794 - protein, 10 aa, Artificial Sequence
  Description of Artificial Sequence: Synthetic peptide
VETGVGRPQV

SEQ ID NO: 1795 - protein, 8 aa, Artificial Sequence
  Description of Artificial Sequence: Synthetic peptide
YESSNPKV

SEQ ID NO: 1796 - protein, 10 aa, Artificial Sequence
  Description of Artificial Sequence: Synthetic peptide
AEIFGIGEEI

SEQ ID NO: 1797 - protein, 9 aa, Artificial Sequence
  Description of Artificial Sequence: Synthetic peptide
AEVVQKVVM

SEQ ID NO: 1798 - protein, 10 aa, Artificial Sequence
  Description of Artificial Sequence: Synthetic peptide
TETGVGRPQV

SEQ ID NO: 1799 - protein, 8 aa, Artificial Sequence
  Description of Artificial Sequence: Synthetic peptide
AEVVQKVV

SEQ ID NO: 1800 - protein, 10 aa, Artificial Sequence
  Description of Artificial Sequence: Synthetic peptide
CEYQAGHNKV

SEQ ID NO: 1801 - protein, 9 aa, Artificial Sequence
  Description of Artificial Sequence: Synthetic peptide
SEMEKEGKI

SEQ ID NO: 1802 - protein, 8 aa, Artificial Sequence
  Description of Artificial Sequence: Synthetic peptide
AENLWVTV

SEQ ID NO: 1803 - protein, 8 aa, Artificial Sequence
  Description of Artificial Sequence: Synthetic peptide
TENLWVTV

SEQ ID NO: 1804 - protein, 9 aa, Artificial Sequence
  Description of Artificial Sequence: Synthetic peptide
KEFNGTGLC

SEQ ID NO: 1805 - protein, 10 aa, Artificial Sequence
  Description of Artificial Sequence: Synthetic peptide
EELKSLFNTV

SEQ ID NO: 1806 - protein, 9 aa, Artificial Sequence
  Description of Artificial Sequence: Synthetic peptide
VEQMHTDII

SEQ ID NO: 1807 - protein, 10 aa, Artificial Sequence
  Description of Artificial Sequence: Synthetic peptide
IEESQTQQEI

SEQ ID NO: 1808 - protein, 8 aa, Artificial Sequence
  Description of Artificial Sequence: Synthetic peptide
QELKISAV

SEQ ID NO: 1809 - protein, 8 aa, Artificial Sequence
  Description of Artificial Sequence: Synthetic peptide
SENITNNV

SEQ ID NO: 1810 - protein, 10 aa, Artificial Sequence
  Description of Artificial Sequence: Synthetic peptide
AELFGMGEEI

SEQ ID NO: 1811 - protein, 10 aa, Artificial Sequence
  Description of Artificial Sequence: Synthetic peptide
KEISNYTNLI

SEQ ID NO: 1812 - protein, 8 aa, Artificial Sequence
  Description of Artificial Sequence: Synthetic peptide
IEQLQPSV

SEQ ID NO: 1813 - protein, 10 aa, Artificial Sequence
  Description of Artificial Sequence: Synthetic peptide
AEGQGTGPTL

SEQ ID NO: 1814 - protein, 9 aa, Artificial Sequence
  Description of Artificial Sequence: Synthetic peptide
CESNITGLI

SEQ ID NO: 1815 - protein, 10 aa, Artificial Sequence
  Description of Artificial Sequence: Synthetic peptide
AERQGTGPTF

SEQ ID NO: 1816 - protein, 11 aa, Artificial Sequence
  Description of Artificial Sequence: Synthetic peptide
AELELAENREI

SEQ ID NO: 1817 - protein, 9 aa, Artificial Sequence
  Description of Artificial Sequence: Synthetic peptide
EESQTQQEI

SEQ ID NO: 1818 - protein, 8 aa, Artificial Sequence
  Description of Artificial Sequence: Synthetic peptide
SELVSQII

SEQ ID NO: 1819 - protein, 9 aa, Artificial Sequence
  Description of Artificial Sequence: Synthetic peptide
YESSNPKVS

SEQ ID NO: 1820 - protein, 8 aa, Artificial Sequence
  Description of Artificial Sequence: Synthetic peptide
SESEVNIV

SEQ ID NO: 1821 - protein, 9 aa, Artificial Sequence
  Description of Artificial Sequence: Synthetic peptide
GEVGFPVRP

SEQ ID NO: 1822 - protein, 9 aa, Artificial Sequence
  Description of Artificial Sequence: Synthetic peptide
LEDLKYEAV

SEQ ID NO: 1823 - protein, 10 aa, Artificial Sequence
  Description of Artificial Sequence: Synthetic peptide
KEISNYTQII

SEQ ID NO: 1824 - protein, 10 aa, Artificial Sequence
  Description of Artificial Sequence: Synthetic peptide
GEIIGDIRKA

SEQ ID NO: 1825 - protein, 9 aa, Artificial Sequence
  Description of Artificial Sequence: Synthetic peptide
GEVGFPVRP

SEQ ID NO: 1826 - protein, 9 aa, Artificial Sequence
  Description of Artificial Sequence: Synthetic peptide
IEVKDTKEA

SEQ ID NO: 1827 - protein, 9 aa, Artificial Sequence
  Description of Artificial Sequence: Synthetic peptide
LEKDPIVGA

SEQ ID NO: 1828 - protein, 10 aa, Artificial Sequence
  Description of Artificial Sequence: Synthetic peptide
GEIIGDIRKA

SEQ ID NO: 1829 - protein, 9 aa, Artificial Sequence
  Description of Artificial Sequence: Synthetic peptide
LEKDPIAGA

SEQ ID NO: 1830 - protein, 9 aa, Artificial Sequence
  Description of Artificial Sequence: Synthetic peptide
AETFYVDGA

SEQ ID NO: 1831 - protein, 9 aa, Artificial Sequence
  Description of Artificial Sequence: Synthetic peptide
RVIEIVQGI

SEQ ID NO: 1832 - protein, 9 aa, Artificial Sequence
  Description of Artificial Sequence: Synthetic peptide
RVIETVQRL

SEQ ID NO: 1833 - protein, 10 aa, Artificial Sequence
  Description of Artificial Sequence: Synthetic peptide
AVFIGFLGTA

SEQ ID NO: 1834 - protein, 11 aa, Artificial Sequence
  Description of Artificial Sequence: Synthetic peptide
TQIDPDLADQL

SEQ ID NO: 1835 - protein, 9 aa, Artificial Sequence
  Description of Artificial Sequence: Synthetic peptide
KEFNGTGLC

SEQ ID NO: 1836 - protein, 9 aa, Artificial Sequence
  Description of Artificial Sequence: Synthetic peptide
LVSQIIEKL

SEQ ID NO: 1837 - protein, 9 aa, Artificial Sequence
  Description of Artificial Sequence: Synthetic peptide
ASITLTVQA

SEQ ID NO: 1838 - protein, 9 aa, Artificial Sequence
  Description of Artificial Sequence: Synthetic peptide
QLAEVVQKV

SEQ ID NO: 1839 - protein, 9 aa, Artificial Sequence
  Description of Artificial Sequence: Synthetic peptide
RVIEIGQGI

SEQ ID NO: 1840 - protein, 10 aa, Artificial Sequence
  Description of Artificial Sequence: Synthetic peptide
AVFIGFLGAA

SEQ ID NO: 1841 - protein, 9 aa, Artificial Sequence
  Description of Artificial Sequence: Synthetic peptide
TETLLVQNA

SEQ ID NO: 1842 - protein, 9 aa, Artificial Sequence
  Description of Artificial Sequence: Synthetic peptide
TETLLIQNA

SEQ ID NO: 1843 - protein, 10 aa, Artificial Sequence
  Description of Artificial Sequence: Synthetic peptide
AETFYVDGAA

SEQ ID NO: 1844 - protein, 9 aa, Artificial Sequence
  Description of Artificial Sequence: Synthetic peptide
AETTLFCAS

SEQ ID NO: 1845 - protein, 9 aa, Artificial Sequence
  Description of Artificial Sequence: Synthetic peptide
ATLEEMMTA

SEQ ID NO: 1846 - protein, 9 aa, Artificial Sequence
  Description of Artificial Sequence: Synthetic peptide
AVFIGFLGA

SEQ ID NO: 1847 - protein, 9 aa, Artificial Sequence
  Description of Artificial Sequence: Synthetic peptide
HEVIFNSTL

SEQ ID NO: 1848 - protein, 11 aa, Artificial Sequence
  Description of Artificial Sequence: Synthetic peptide
TQIDPDQADQL

SEQ ID NO: 1849 - protein, 8 aa, Artificial Sequence
  Description of Artificial Sequence: Synthetic peptide
SEYILINC

SEQ ID NO: 1850 - protein, 8 aa, Artificial Sequence
  Description of Artificial Sequence: Synthetic peptide
AETTLFCA

SEQ ID NO: 1851 - protein, 8 aa, Artificial Sequence
  Description of Artificial Sequence: Synthetic peptide
HEVIFNST

SEQ ID NO: 1852 - protein, 10 aa, Artificial Sequence
  Description of Artificial Sequence: Synthetic peptide
REQAEHLKTA

SEQ ID NO: 1853 - protein, 9 aa, Artificial Sequence
  Description of Artificial Sequence: Synthetic peptide
ASMTLTVQA

SEQ ID NO: 1854 - protein, 9 aa, Artificial Sequence
  Description of Artificial Sequence: Synthetic peptide
EEVGFPVRP

SEQ ID NO: 1855 - protein, 9 aa, Artificial Sequence
  Description of Artificial Sequence: Synthetic peptide
YESSNPKVS

SEQ ID NO: 1856 - protein, 9 aa, Artificial Sequence
  Description of Artificial Sequence: Synthetic peptide
FPISPISTV

SEQ ID NO: 1857 - protein, 9 aa, Artificial Sequence
  Description of Artificial Sequence: Synthetic peptide
FPISPIETV

SEQ ID NO: 1858 - protein, 9 aa, Artificial Sequence
  Description of Artificial Sequence: Synthetic peptide
DAKAYDTEV

SEQ ID NO: 1859 - protein, 8 aa, Artificial Sequence
  Description of Artificial Sequence: Synthetic peptide
YAPPIPGV

SEQ ID NO: 1860 - protein, 9 aa, Artificial Sequence
  Description of Artificial Sequence: Synthetic peptide
LPPIIAKEI

SEQ ID NO: 1861 - protein, 10 aa, Artificial Sequence
  Description of Artificial Sequence: Synthetic peptide
IPYNPQSQGV

SEQ ID NO: 1862 - protein, 9 aa, Artificial Sequence
  Description of Artificial Sequence: Synthetic peptide
YAPPIPGVI

SEQ ID NO: 1863 - protein, 8 aa, Artificial Sequence
  Description of Artificial Sequence: Synthetic peptide
TAPPAAEI

SEQ ID NO: 1864 - protein, 8 aa, Artificial Sequence
  Description of Artificial Sequence: Synthetic peptide
YAPPIQGV

SEQ ID NO: 1865 - protein, 9 aa, Artificial Sequence
  Description of Artificial Sequence: Synthetic peptide
LPPIVAKEI

SEQ ID NO: 1866 - protein, 9 aa, Artificial Sequence
  Description of Artificial Sequence: Synthetic peptide
IPIGDARIV

SEQ ID NO: 1867 - protein, 9 aa, Artificial Sequence
  Description of Artificial Sequence: Synthetic peptide
IPLGDAKLV

SEQ ID NO: 1868 - protein, 8 aa, Artificial Sequence
  Description of Artificial Sequence: Synthetic peptide
EPVNITCI

SEQ ID NO: 1869 - protein, 10 aa, Artificial Sequence
  Description of Artificial Sequence: Synthetic peptide
IPLGDAKLVV

SEQ ID NO: 1870 - protein, 11 aa, Artificial Sequence
  Description of Artificial Sequence: Synthetic peptide
IPYNPQSQGVV

SEQ ID NO: 1871 - protein, 8 aa, Artificial Sequence
  Description of Artificial Sequence: Synthetic peptide
SPVSILDI

SEQ ID NO: 1872 - protein, 9 aa, Artificial Sequence
  Description of Artificial Sequence: Synthetic peptide
IPLGDAKIV

SEQ ID NO: 1873 - protein, 9 aa, Artificial Sequence
  Description of Artificial Sequence: Synthetic peptide
HPVHAGPVA

SEQ ID NO: 1874 - protein, 9 aa, Artificial Sequence
  Description of Artificial Sequence: Synthetic peptide
FPISPISTV

SEQ ID NO: 1875 - protein, 9 aa, Artificial Sequence
  Description of Artificial Sequence: Synthetic peptide
FPISPIETV

SEQ ID NO: 1876 - protein, 10 aa, Artificial Sequence
  Description of Artificial Sequence: Synthetic peptide
EPLGIAPTTA

SEQ ID NO: 1877 - protein, 9 aa, Artificial Sequence
  Description of Artificial Sequence: Synthetic peptide
HPGSQPTTA

SEQ ID NO: 1878 - protein, 9 aa, Artificial Sequence
  Description of Artificial Sequence: Synthetic peptide
EPIPIHYCA

SEQ ID NO: 1879 - protein, 9 aa, Artificial Sequence
  Description of Artificial Sequence: Synthetic peptide
HVASGYIEA

SEQ ID NO: 1880 - protein, 9 aa, Artificial Sequence
  Description of Artificial Sequence: Synthetic peptide
NPYNTPIFA

SEQ ID NO: 1881 - protein, 10 aa, Artificial Sequence
  Description of Artificial Sequence: Synthetic peptide
TPLEIWSIVG

SEQ ID NO: 1882 - protein, 10 aa, Artificial Sequence
  Description of Artificial Sequence: Synthetic peptide
EPLGVAPTKA

SEQ ID NO: 1883 - protein, 11 aa, Artificial Sequence
  Description of Artificial Sequence: Synthetic peptide
FPISPISTVPV

SEQ ID NO: 1884 - protein, 9 aa, Artificial Sequence
  Description of Artificial Sequence: Synthetic peptide
SPAATGVGA

SEQ ID NO: 1885 - protein, 10 aa, Artificial Sequence
  Description of Artificial Sequence: Synthetic peptide
FPQSRPEPTA

SEQ ID NO: 1886 - protein, 10 aa, Artificial Sequence
  Description of Artificial Sequence: Synthetic peptide
EPLGVAPTRA

SEQ ID NO: 1887 - protein, 10 aa, Artificial Sequence
  Description of Artificial Sequence: Synthetic peptide
FPQSRPEPSA

SEQ ID NO: 1888 - protein, 9 aa, Artificial Sequence
  Description of Artificial Sequence: Synthetic peptide
TPLEIWSIV

SEQ ID NO: 1889 - protein, 9 aa, Artificial Sequence
  Description of Artificial Sequence: Synthetic peptide
HPSCVWLEA

SEQ ID NO: 1890 - protein, 9 aa, Artificial Sequence
  Description of Artificial Sequence: Synthetic peptide
YPIVQNAQG

SEQ ID NO: 1891 - protein, 8 aa, Artificial Sequence
  Description of Artificial Sequence: Synthetic peptide
TAFTIPST

SEQ ID NO: 1892 - protein, 11 aa, Artificial Sequence
  Description of Artificial Sequence: Synthetic peptide
FPISPIETVPV

SEQ ID NO: 1893 - protein, 8 aa, Artificial Sequence
  Description of Artificial Sequence: Synthetic peptide
FPSEQTRA

SEQ ID NO: 1894 - protein, 9 aa, Artificial Sequence
  Description of Artificial Sequence: Synthetic peptide
QIMEQLQSA

SEQ ID NO: 1895 - protein, 9 aa, Artificial Sequence
  Description of Artificial Sequence: Synthetic peptide
DANTTLFCA

SEQ ID NO: 1896 - protein, 10 aa, Artificial Sequence
  Description of Artificial Sequence: Synthetic peptide
HPVHAGPVAP

SEQ ID NO: 1897 - protein, 9 aa, Artificial Sequence
  Description of Artificial Sequence: Synthetic peptide
HPVHAGPIP

SEQ ID NO: 1898 - protein, 10 aa, Artificial Sequence
  Description of Artificial Sequence: Synthetic peptide
YPEPKGTRQA

SEQ ID NO: 1899 - protein, 9 aa, Artificial Sequence
  Description of Artificial Sequence: Synthetic peptide
IPIGDARIV

SEQ ID NO: 1900 - protein, 10 aa, Artificial Sequence
  Description of Artificial Sequence: Synthetic peptide
HPVHAGPIPP

SEQ ID NO: 1901 - protein, 9 aa, Artificial Sequence
  Description of Artificial Sequence: Synthetic peptide
HPVHAGPVA

SEQ ID NO: 1902 - protein, 9 aa, Artificial Sequence
  Description of Artificial Sequence: Synthetic peptide
FPISPISTV

SEQ ID NO: 1903 - protein, 9 aa, Artificial Sequence
  Description of Artificial Sequence: Synthetic peptide
IPKQPIPQT

SEQ ID NO: 1904 - protein, 9 aa, Artificial Sequence
  Description of Artificial Sequence: Synthetic peptide
FPISPIETV

SEQ ID NO: 1905 - protein, 9 aa, Artificial Sequence
  Description of Artificial Sequence: Synthetic peptide
SPAATGVGA

SEQ ID NO: 1906 - protein, 9 aa, Artificial Sequence
  Description of Artificial Sequence: Synthetic peptide
RPEPTAPPA

SEQ ID NO: 1907 - protein, 10 aa, Artificial Sequence
  Description of Artificial Sequence: Synthetic peptide
YPEPKGTRQA

SEQ ID NO: 1908 - protein, 9 aa, Artificial Sequence
  Description of Artificial Sequence: Synthetic peptide
SPAATGVGA

SEQ ID NO: 1909 - protein, 9 aa, Artificial Sequence
  Description of Artificial Sequence: Synthetic peptide
HPVHAGPVA

SEQ ID NO: 1910 - protein, 9 aa, Artificial Sequence
  Description of Artificial Sequence: Synthetic peptide
FPISPIETV

SEQ ID NO: 1911 - protein, 9 aa, Artificial Sequence
  Description of Artificial Sequence: Synthetic peptide
FPISPISTV

SEQ ID NO: 1912 - protein, 10 aa, Artificial Sequence
  Description of Artificial Sequence: Synthetic peptide
APTAAKGVGA

SEQ ID NO: 1913 - protein, 10 aa, Artificial Sequence
  Description of Artificial Sequence: Synthetic peptide
EPLGIAPTTA

SEQ ID NO: 1914 - protein, 9 aa, Artificial Sequence
  Description of Artificial Sequence: Synthetic peptide
HPGSQPTTA

SEQ ID NO: 1915 - protein, 10 aa, Artificial Sequence
  Description of Artificial Sequence: Synthetic peptide
IPAETGQETA

SEQ ID NO: 1916 - protein, 9 aa, Artificial Sequence
  Description of Artificial Sequence: Synthetic peptide
NPYNTPIFA

SEQ ID NO: 1917 - protein, 9 aa, Artificial Sequence
  Description of Artificial Sequence: Synthetic peptide
RPEPTAPPA

SEQ ID NO: 1918 - protein, 10 aa, Artificial Sequence
  Description of Artificial Sequence: Synthetic peptide
RPEPTAPPAA

SEQ ID NO: 1919 - protein, 9 aa, Artificial Sequence
  Description of Artificial Sequence: Synthetic peptide
QPIPQTQGV

SEQ ID NO: 1920 - protein, 9 aa, Artificial Sequence
  Description of Artificial Sequence: Synthetic peptide
IPKQPIPQT

SEQ ID NO: 1921 - protein, 10 aa, Artificial Sequence
  Description of Artificial Sequence: Synthetic peptide
TPTAAEGVGA

SEQ ID NO: 1922 - protein, 10 aa, Artificial Sequence
  Description of Artificial Sequence: Synthetic peptide
EPLGVAPTKA

SEQ ID NO: 1923 - protein, 10 aa, Artificial Sequence
  Description of Artificial Sequence: Synthetic peptide
IPYNPQSQGV

SEQ ID NO: 1924 - protein, 8 aa, Artificial Sequence
  Description of Artificial Sequence: Synthetic peptide
SPVSILDV

SEQ ID NO: 1925 - protein, 9 aa, Artificial Sequence
  Description of Artificial Sequence: Synthetic peptide
SPAATGVGA

SEQ ID NO: 1926 - protein, 9 aa, Artificial Sequence
  Description of Artificial Sequence: Synthetic peptide
HPVHAGPVA

SEQ ID NO: 1927 - protein, 10 aa, Artificial Sequence
  Description of Artificial Sequence: Synthetic peptide
APTAAKGVGA

SEQ ID NO: 1928 - protein, 9 aa, Artificial Sequence
  Description of Artificial Sequence: Synthetic peptide
FPISPIETV

SEQ ID NO: 1929 - protein, 9 aa, Artificial Sequence
  Description of Artificial Sequence: Synthetic peptide
FPISPISTV

SEQ ID NO: 1930 - protein, 9 aa, Artificial Sequence
  Description of Artificial Sequence: Synthetic peptide
QPIPQTQGV

SEQ ID NO: 1931 - protein, 10 aa, Artificial Sequence
  Description of Artificial Sequence: Synthetic peptide
IPYNPQSQGV

SEQ ID NO: 1932 - protein, 10 aa, Artificial Sequence
  Description of Artificial Sequence: Synthetic peptide
APAGFAILKC

SEQ ID NO: 1933 - protein, 10 aa, Artificial Sequence
  Description of Artificial Sequence: Synthetic peptide
SPAATGVGAV

SEQ ID NO: 1934 - protein, 9 aa, Artificial Sequence
  Description of Artificial Sequence: Synthetic peptide
IPKQPIPQT

SEQ ID NO: 1935 - protein, 9 aa, Artificial Sequence
  Description of Artificial Sequence: Synthetic peptide
HPGSQPTTA

SEQ ID NO: 1936 - protein, 10 aa, Artificial Sequence
  Description of Artificial Sequence: Synthetic peptide
IPAETGQETA

SEQ ID NO: 1937 - protein, 9 aa, Artificial Sequence
  Description of Artificial Sequence: Synthetic peptide
QIMEQLQSA

SEQ ID NO: 1938 - protein, 9 aa, Artificial Sequence
  Description of Artificial Sequence: Synthetic peptide
RPEPTAPPA

SEQ ID NO: 1939 - protein, 10 aa, Artificial Sequence
  Description of Artificial Sequence: Synthetic peptide
RPNNNTRTSI

SEQ ID NO: 1940 - protein, 10 aa, Artificial Sequence
  Description of Artificial Sequence: Synthetic peptide
SPEVIPMFSA

SEQ ID NO: 1941 - protein, 10 aa, Artificial Sequence
  Description of Artificial Sequence: Synthetic peptide
LTRDGGITSA

SEQ ID NO: 1942 - protein, 8 aa, Artificial Sequence
  Description of Artificial Sequence: Synthetic peptide
SPVSILDV

SEQ ID NO: 1943 - protein, 10 aa, Artificial Sequence
  Description of Artificial Sequence: Synthetic peptide
APAGYAILKC

SEQ ID NO: 1944 - protein, 10 aa, Artificial Sequence
  Description of Artificial Sequence: Synthetic peptide
RPLVTVKIGG

SEQ ID NO: 1945 - protein, 9 aa, Artificial Sequence
  Description of Artificial Sequence: Synthetic peptide
NPYNTPIFA

SEQ ID NO: 1946 - protein, 11 aa, Artificial Sequence
  Description of Artificial Sequence: Synthetic peptide
KAYDTEVHNVW

SEQ ID NO: 1947 - protein, 9 aa, Artificial Sequence
  Description of Artificial Sequence: Synthetic peptide
LSFPQITLW

SEQ ID NO: 1948 - protein, 9 aa, Artificial Sequence
  Description of Artificial Sequence: Synthetic peptide
TTVPWNASW

SEQ ID NO: 1949 - protein, 11 aa, Artificial Sequence
  Description of Artificial Sequence: Synthetic peptide
KAYETEKHNVW

SEQ ID NO: 1950 - protein, 10 aa, Artificial Sequence
  Description of Artificial Sequence: Synthetic peptide
TTNVPWNNTW

SEQ ID NO: 1951 - protein, 9 aa, Artificial Sequence
  Description of Artificial Sequence: Synthetic peptide
TSELFNRTW

SEQ ID NO: 1952 - protein, 9 aa, Artificial Sequence
  Description of Artificial Sequence: Synthetic peptide
FSFPQITLW

SEQ ID NO: 1953 - protein, 11 aa, Artificial Sequence
  Description of Artificial Sequence: Synthetic peptide
KSVRIGPGQTF

SEQ ID NO: 1954 - protein, 11 aa, Artificial Sequence
  Description of Artificial Sequence: Synthetic peptide
GAISPTSRDLW

SEQ ID NO: 1955 - protein, 11 aa, Artificial Sequence
  Description of Artificial Sequence: Synthetic peptide
RANSPTSGALW

SEQ ID NO: 1956 - protein, 10 aa, Artificial Sequence
  Description of Artificial Sequence: Synthetic peptide
NTSELFNRTW

SEQ ID NO: 1957 - protein, 9 aa, Artificial Sequence
  Description of Artificial Sequence: Synthetic peptide
RIKQIINMW

SEQ ID NO: 1958 - protein, 11 aa, Artificial Sequence
  Description of Artificial Sequence: Synthetic peptide
RSVRIGPGQTF

SEQ ID NO: 1959 - protein, 9 aa, Artificial Sequence
  Description of Artificial Sequence: Synthetic peptide
RSIRLVNGF

SEQ ID NO: 1960 - protein, 10 aa, Artificial Sequence
  Description of Artificial Sequence: Synthetic peptide
SSLKGLRLGW

SEQ ID NO: 1961 - protein, 9 aa, Artificial Sequence
  Description of Artificial Sequence: Synthetic peptide
TSGLFNSTW

SEQ ID NO: 1962 - protein, 9 aa, Artificial Sequence
  Description of Artificial Sequence: Synthetic peptide
KALTDIVTL

SEQ ID NO: 1963 - protein, 9 aa, Artificial Sequence
  Description of Artificial Sequence: Synthetic peptide
KVVVQLRTY

SEQ ID NO: 1964 - protein, 9 aa, Artificial Sequence
  Description of Artificial Sequence: Synthetic peptide
TIAIVVAGW

SEQ ID NO: 1965 - protein, 9 aa, Artificial Sequence
  Description of Artificial Sequence: Synthetic peptide
SSGLFNSTW

SEQ ID NO: 1966 - protein, 9 aa, Artificial Sequence
  Description of Artificial Sequence: Synthetic peptide
KALTDVVTL

SEQ ID NO: 1967 - protein, 10 aa, Artificial Sequence
  Description of Artificial Sequence: Synthetic peptide
VTVYYGVPVW

SEQ ID NO: 1968 - protein, 10 aa, Artificial Sequence
  Description of Artificial Sequence: Synthetic peptide
NTSGLFNSTW

SEQ ID NO: 1969 - protein, 9 aa, Artificial Sequence
  Description of Artificial Sequence: Synthetic peptide
LGHGVSIEW

SEQ ID NO: 1970 - protein, 9 aa, Artificial Sequence
  Description of Artificial Sequence: Synthetic peptide
QATQDVKHW

SEQ ID NO: 1971 - protein, 9 aa, Artificial Sequence
  Description of Artificial Sequence: Synthetic peptide
TNVPWNNTW

SEQ ID NO: 1972 - protein, 9 aa, Artificial Sequence
  Description of Artificial Sequence: Synthetic peptide
RVMGIERNY

SEQ ID NO: 1973 - protein, 11 aa, Artificial Sequence
  Description of Artificial Sequence: Synthetic peptide
SVLSGGKLDAW

SEQ ID NO: 1974 - protein, 9 aa, Artificial Sequence
  Description of Artificial Sequence: Synthetic peptide
RIKQVINMW

SEQ ID NO: 1975 - protein, 11 aa, Artificial Sequence
  Description of Artificial Sequence: Synthetic peptide
KSLFNTVATLY

SEQ ID NO: 1976 - protein, 9 aa, Artificial Sequence
  Description of Artificial Sequence: Synthetic peptide
VTMESIVIW

SEQ ID NO: 1977 - protein, 9 aa, Artificial Sequence
  Description of Artificial Sequence: Synthetic peptide
RSIRLVSGF

SEQ ID NO: 1978 - protein, 10 aa, Artificial Sequence
  Description of Artificial Sequence: Synthetic peptide
TSTPQEQLQW

SEQ ID NO: 1979 - protein, 10 aa, Artificial Sequence
  Description of Artificial Sequence: Synthetic peptide
GTRFPLTFGW

SEQ ID NO: 1980 - protein, 9 aa, Artificial Sequence
  Description of Artificial Sequence: Synthetic peptide
KTAVQMAVF

SEQ ID NO: 1981 - protein, 10 aa, Artificial Sequence
  Description of Artificial Sequence: Synthetic peptide
RSKNPDIVIY

SEQ ID NO: 1982 - protein, 9 aa, Artificial Sequence
  Description of Artificial Sequence: Synthetic peptide
WSKSSIVGW

SEQ ID NO: 1983 - protein, 11 aa, Artificial Sequence
  Description of Artificial Sequence: Synthetic peptide
ATSTPQEQLQW

SEQ ID NO: 1984 - protein, 11 aa, Artificial Sequence
  Description of Artificial Sequence: Synthetic peptide
RTLQQLLFVHF

SEQ ID NO: 1985 - protein, 9 aa, Artificial Sequence
  Description of Artificial Sequence: Synthetic peptide
QATQEVKSW

SEQ ID NO: 1986 - protein, 11 aa, Artificial Sequence
  Description of Artificial Sequence: Synthetic peptide
KSVRIGPGQTF

SEQ ID NO: 1987 - protein, 9 aa, Artificial Sequence
  Description of Artificial Sequence: Synthetic peptide
KALTDVVTL

SEQ ID NO: 1988 - protein, 9 aa, Artificial Sequence
  Description of Artificial Sequence: Synthetic peptide
KALTDIVTL

SEQ ID NO: 1989 - protein, 11 aa, Artificial Sequence
  Description of Artificial Sequence: Synthetic peptide
RSVRIGPGQTF

SEQ ID NO: 1990 - protein, 9 aa, Artificial Sequence
  Description of Artificial Sequence: Synthetic peptide
SSSKVSQNY

SEQ ID NO: 1991 - protein, 11 aa, Artificial Sequence
  Description of Artificial Sequence: Synthetic peptide
RANSPTSGALW

SEQ ID NO: 1992 - protein, 9 aa, Artificial Sequence
  Description of Artificial Sequence: Synthetic peptide
TSGLFNSTW

SEQ ID NO: 1993 - protein, 9 aa, Artificial Sequence
  Description of Artificial Sequence: Synthetic peptide
RAVGIGAVF

SEQ ID NO: 1994 - protein, 9 aa, Artificial Sequence
  Description of Artificial Sequence: Synthetic peptide
TTNQKTELY

SEQ ID NO: 1995 - protein, 11 aa, Artificial Sequence
  Description of Artificial Sequence: Synthetic peptide
KAYDTEVHNVW

SEQ ID NO: 1996 - protein, 8 aa, Artificial Sequence
  Description of Artificial Sequence: Synthetic peptide
IEITTHSF

SEQ ID NO: 1997 - protein, 9 aa, Artificial Sequence
  Description of Artificial Sequence: Synthetic peptide
RVIETVQRL

SEQ ID NO: 1998 - protein, 9 aa, Artificial Sequence
  Description of Artificial Sequence: Synthetic peptide
GTEELRSLY

SEQ ID NO: 1999 - protein, 9 aa, Artificial Sequence
  Description of Artificial Sequence: Synthetic peptide
RAIEAQQHL

SEQ ID NO: 2000 - protein, 9 aa, Artificial Sequence
  Description of Artificial Sequence: Synthetic peptide
RAIEAQQHM

SEQ ID NO: 2001 - protein, 10 aa, Artificial Sequence
  Description of Artificial Sequence: Synthetic peptide
KTLNNNTIEM

SEQ ID NO: 2002 - protein, 9 aa, Artificial Sequence
  Description of Artificial Sequence: Synthetic peptide
QATQEVKSW

SEQ ID NO: 2003 - protein, 9 aa, Artificial Sequence
  Description of Artificial Sequence: Synthetic peptide
NSSKVSQNY

SEQ ID NO: 2004 - protein, 11 aa, Artificial Sequence
  Description of Artificial Sequence: Synthetic peptide
TSIRIGPGQSF

SEQ ID NO: 2005 - protein, 9 aa, Artificial Sequence
  Description of Artificial Sequence: Synthetic peptide
SSGLFNSTW

SEQ ID NO: 2006 - protein, 9 aa, Artificial Sequence
  Description of Artificial Sequence: Synthetic peptide
TTVPWNASW

SEQ ID NO: 2007 - protein, 11 aa, Artificial Sequence
  Description of Artificial Sequence: Synthetic peptide
GAISPTSRDLW

SEQ ID NO: 2008 - protein, 9 aa, Artificial Sequence
  Description of Artificial Sequence: Synthetic peptide
AAVDLSHFL

SEQ ID NO: 2009 - protein, 9 aa, Artificial Sequence
  Description of Artificial Sequence: Synthetic peptide
KAAVDLSHF

SEQ ID NO: 2010 - protein, 9 aa, Artificial Sequence
  Description of Artificial Sequence: Synthetic peptide
TIAIVVAGW

SEQ ID NO: 2011 - protein, 10 aa, Artificial Sequence
  Description of Artificial Sequence: Synthetic peptide
TSTPQEQIAW

SEQ ID NO: 2012 - protein, 9 aa, Artificial Sequence
  Description of Artificial Sequence: Synthetic peptide
KTAVQMAVF

SEQ ID NO: 2013 - protein, 10 aa, Artificial Sequence
  Description of Artificial Sequence: Synthetic peptide
RAIEAQQHLL

SEQ ID NO: 2014 - protein, 10 aa, Artificial Sequence
  Description of Artificial Sequence: Synthetic peptide
TTNVPWNNTW

SEQ ID NO: 2015 - protein, 9 aa, Artificial Sequence
  Description of Artificial Sequence: Synthetic peptide
HCVVNKTEW

SEQ ID NO: 2016 - protein, 9 aa, Artificial Sequence
  Description of Artificial Sequence: Synthetic peptide
FSVPLDESF

SEQ ID NO: 2017 - protein, 8 aa, Artificial Sequence
  Description of Artificial Sequence: Synthetic peptide
IAIAVAGW

SEQ ID NO: 2018 - protein, 9 aa, Artificial Sequence
  Description of Artificial Sequence: Synthetic peptide
TINEEAAEW

SEQ ID NO: 2019 - protein, 10 aa, Artificial Sequence
  Description of Artificial Sequence: Synthetic peptide
TSTPQEQLQW

SEQ ID NO: 2020 - protein, 8 aa, Artificial Sequence
  Description of Artificial Sequence: Synthetic peptide
NSPTSGAL

SEQ ID NO: 2021 - protein, 9 aa, Artificial Sequence
  Description of Artificial Sequence: Synthetic peptide
NSPTSSRDL

SEQ ID NO: 2022 - protein, 9 aa, Artificial Sequence
  Description of Artificial Sequence: Synthetic peptide
YSPVSILDI

SEQ ID NO: 2023 - protein, 9 aa, Artificial Sequence
  Description of Artificial Sequence: Synthetic peptide
SIVTRTVEL

SEQ ID NO: 2024 - protein, 9 aa, Artificial Sequence
  Description of Artificial Sequence: Synthetic peptide
YSPVSILDV

SEQ ID NO: 2025 - protein, 9 aa, Artificial Sequence
  Description of Artificial Sequence: Synthetic peptide
YSPTSILDI

SEQ ID NO: 2026 - protein, 9 aa, Artificial Sequence
  Description of Artificial Sequence: Synthetic peptide
YAPPIRGAI

SEQ ID NO: 2027 - protein, 9 aa, Artificial Sequence
  Description of Artificial Sequence: Synthetic peptide
RAVGIGAVF

SEQ ID NO: 2028 - protein, 9 aa, Artificial Sequence
  Description of Artificial Sequence: Synthetic peptide
AAVDLSHFL

SEQ ID NO: 2029 - protein, 9 aa, Artificial Sequence
  Description of Artificial Sequence: Synthetic peptide
TTNQKTELY

SEQ ID NO: 2030 - protein, 9 aa, Artificial Sequence
  Description of Artificial Sequence: Synthetic peptide
AEVVQKVTM

SEQ ID NO: 2031 - protein, 8 aa, Artificial Sequence
  Description of Artificial Sequence: Synthetic peptide
MENVTEEF

SEQ ID NO: 2032 - protein, 9 aa, Artificial Sequence
  Description of Artificial Sequence: Synthetic peptide
GTEELRSLY

SEQ ID NO: 2033 - protein, 9 aa, Artificial Sequence
  Description of Artificial Sequence: Synthetic peptide
AEVVQKVVM

SEQ ID NO: 2034 - protein, 8 aa, Artificial Sequence
  Description of Artificial Sequence: Synthetic peptide
VLDVGDAY

SEQ ID NO: 2035 - protein, 9 aa, Artificial Sequence
  Description of Artificial Sequence: Synthetic peptide
AAVDLSHFL

SEQ ID NO: 2036 - protein, 9 aa, Artificial Sequence
  Description of Artificial Sequence: Synthetic peptide
RAIEAQQHL

SEQ ID NO: 2037 - protein, 9 aa, Artificial Sequence
  Description of Artificial Sequence: Synthetic peptide
LAWDDLRSL

SEQ ID NO: 2038 - protein, 9 aa, Artificial Sequence
  Description of Artificial Sequence: Synthetic peptide
SIVTRTVEL

SEQ ID NO: 2039 - protein, 9 aa, Artificial Sequence
  Description of Artificial Sequence: Synthetic peptide
KALGSGATL

SEQ ID NO: 2040 - protein, 9 aa, Artificial Sequence
  Description of Artificial Sequence: Synthetic peptide
AAVDLSHFL

SEQ ID NO: 2041 - protein, 9 aa, Artificial Sequence
  Description of Artificial Sequence: Synthetic peptide
RAIEAQQHL

SEQ ID NO: 2042 - protein, 9 aa, Artificial Sequence
  Description of Artificial Sequence: Synthetic peptide
SIVTRTVEL

SEQ ID NO: 2043 - protein, 9 aa, Artificial Sequence
  Description of Artificial Sequence: Synthetic peptide
YSTQIDPDL

SEQ ID NO: 2044 - protein, 9 aa, Artificial Sequence
  Description of Artificial Sequence: Synthetic peptide
KALGSGATL

SEQ ID NO: 2045 - protein, 9 aa, Artificial Sequence
  Description of Artificial Sequence: Synthetic peptide
ATDIQTKEL

SEQ ID NO: 2046 - protein, 9 aa, Artificial Sequence
  Description of Artificial Sequence: Synthetic peptide
YVDRFFKTL

SEQ ID NO: 2047 - protein, 9 aa, Artificial Sequence
  Description of Artificial Sequence: Synthetic peptide
LAWDDLRSL

SEQ ID NO: 2048 - protein, 9 aa, Artificial Sequence
  Description of Artificial Sequence: Synthetic peptide
YYDPSKELI

SEQ ID NO: 2049 - protein, 9 aa, Artificial Sequence
  Description of Artificial Sequence: Synthetic peptide
KFDSSLARV

SEQ ID NO: 2050 - protein, 10 aa, Artificial Sequence
  Description of Artificial Sequence: Synthetic peptide
NYDLGNDINL

SEQ ID NO: 2051 - protein, 10 aa, Artificial Sequence
  Description of Artificial Sequence: Synthetic peptide
NYDLGDINNL

SEQ ID NO: 2052 - protein, 9 aa, Artificial Sequence
  Description of Artificial Sequence: Synthetic peptide
QYDQILIEI

SEQ ID NO: 2053 - protein, 8 aa, Artificial Sequence
  Description of Artificial Sequence: Synthetic peptide
HTDNGSNF

SEQ ID NO: 2054 - protein, 8 aa, Artificial Sequence
  Description of Artificial Sequence: Synthetic peptide
AVDLSHFL

SEQ ID NO: 2055 - protein, 9 aa, Artificial Sequence
  Description of Artificial Sequence: Synthetic peptide
ATDIQTREL

SEQ ID NO: 2056 - protein, 9 aa, Artificial Sequence
  Description of Artificial Sequence: Synthetic peptide
VLDVGDAYF

SEQ ID NO: 2057 - protein, 9 aa, Artificial Sequence
  Description of Artificial Sequence: Synthetic peptide
IQDNSDIKV

SEQ ID NO: 2058 - protein, 9 aa, Artificial Sequence
  Description of Artificial Sequence: Synthetic peptide
QRPLVTVKI

SEQ ID NO: 2059 - protein, 9 aa, Artificial Sequence
  Description of Artificial Sequence: Synthetic peptide
QRPLVTVRI

SEQ ID NO: 2060 - protein, 9 aa, Artificial Sequence
  Description of Artificial Sequence: Synthetic peptide
FYRLDIVQL

SEQ ID NO: 2061 - protein, 8 aa, Artificial Sequence
  Description of Artificial Sequence: Synthetic peptide
IVGLIVAL

SEQ ID NO: 2062 - protein, 9 aa, Artificial Sequence
  Description of Artificial Sequence: Synthetic peptide
SAVNLYDTI

SEQ ID NO: 2063 - protein, 9 aa, Artificial Sequence
  Description of Artificial Sequence: Synthetic peptide
AAVDLSHFL

SEQ ID NO: 2064 - protein, 9 aa, Artificial Sequence
  Description of Artificial Sequence: Synthetic peptide
TLNNNTIEM

SEQ ID NO: 2065 - protein, 9 aa, Artificial Sequence
  Description of Artificial Sequence: Synthetic peptide
KALTDVVTL

SEQ ID NO: 2066 - protein, 9 aa, Artificial Sequence
  Description of Artificial Sequence: Synthetic peptide
KALTDIVTL

SEQ ID NO: 2067 - protein, 9 aa, Artificial Sequence
  Description of Artificial Sequence: Synthetic peptide
SQVQHTNIM

SEQ ID NO: 2068 - protein, 9 aa, Artificial Sequence
  Description of Artificial Sequence: Synthetic peptide
HCNVSGSQW

SEQ ID NO: 2069 - protein, 9 aa, Artificial Sequence
  Description of Artificial Sequence: Synthetic peptide
DQNPPSVSL

SEQ ID NO: 2070 - protein, 9 aa, Artificial Sequence
  Description of Artificial Sequence: Synthetic peptide
FLGAAGSTM

SEQ ID NO: 2071 - protein, 9 aa, Artificial Sequence
  Description of Artificial Sequence: Synthetic peptide
SAINLLDTI

SEQ ID NO: 2072 - protein, 11 aa, Artificial Sequence
  Description of Artificial Sequence: Synthetic peptide
TQIDPDLADQL

SEQ ID NO: 2073 - protein, 9 aa, Artificial Sequence
  Description of Artificial Sequence: Synthetic peptide
WVNGTTSSM

SEQ ID NO: 2074 - protein, 11 aa, Artificial Sequence
  Description of Artificial Sequence: Synthetic peptide
TQIDPDQADQL

SEQ ID NO: 2075 - protein, 9 aa, Artificial Sequence
  Description of Artificial Sequence: Synthetic peptide
TVLDVGDAY

SEQ ID NO: 2076 - protein, 9 aa, Artificial Sequence
  Description of Artificial Sequence: Synthetic peptide
YDLGDINNL

SEQ ID NO: 2077 - protein, 9 aa, Artificial Sequence
  Description of Artificial Sequence: Synthetic peptide
IVTDSQYAL

SEQ ID NO: 2078 - protein, 10 aa, Artificial Sequence
  Description of Artificial Sequence: Synthetic peptide
NIVGGHQAAM

SEQ ID NO: 2079 - protein, 9 aa, Artificial Sequence
  Description of Artificial Sequence: Synthetic peptide
SQAQQTSIM

SEQ ID NO: 2080 - protein, 9 aa, Artificial Sequence
  Description of Artificial Sequence: Synthetic peptide
ASDLQTKEL

SEQ ID NO: 2081 - protein, 9 aa, Artificial Sequence
  Description of Artificial Sequence: Synthetic peptide
ATDIQTREL

SEQ ID NO: 2082 - protein, 8 aa, Artificial Sequence
  Description of Artificial Sequence: Synthetic peptide
AVDLSHFL

SEQ ID NO: 2083 - protein, 9 aa, Artificial Sequence
  Description of Artificial Sequence: Synthetic peptide
ATDIQTKEL

SEQ ID NO: 2084 - protein, 9 aa, Artificial Sequence
  Description of Artificial Sequence: Synthetic peptide
IIDIIASDL

SEQ ID NO: 2085 - protein, 9 aa, Artificial Sequence
  Description of Artificial Sequence: Synthetic peptide
LIDMGNYDL

SEQ ID NO: 2086 - protein, 10 aa, Artificial Sequence
  Description of Artificial Sequence: Synthetic peptide
NYDLGDINNL

SEQ ID NO: 2087 - protein, 9 aa, Artificial Sequence
  Description of Artificial Sequence: Synthetic peptide
TQDFWEVQL

SEQ ID NO: 2088 - protein, 9 aa, Artificial Sequence
  Description of Artificial Sequence: Synthetic peptide
LVDMGDYDL

SEQ ID NO: 2089 - protein, 8 aa, Artificial Sequence
  Description of Artificial Sequence: Synthetic peptide
GQMIHQSL

SEQ ID NO: 2090 - protein, 11 aa, Artificial Sequence
  Description of Artificial Sequence: Synthetic peptide
GDYDLGDDNNL

SEQ ID NO: 2091 - protein, 9 aa, Artificial Sequence
  Description of Artificial Sequence: Synthetic peptide
RALGTGATL

SEQ ID NO: 2092 - protein, 11 aa, Artificial Sequence
  Description of Artificial Sequence: Synthetic peptide
SQGTETGVGRP

SEQ ID NO: 2093 - protein, 9 aa, Artificial Sequence
  Description of Artificial Sequence: Synthetic peptide
RALGAGATL

SEQ ID NO: 2094 - protein, 9 aa, Artificial Sequence
  Description of Artificial Sequence: Synthetic peptide
EQVPPLVSL

SEQ ID NO: 2095 - protein, 9 aa, Artificial Sequence
  Description of Artificial Sequence: Synthetic peptide
YDLGDINNL

SEQ ID NO: 2096 - protein, 9 aa, Artificial Sequence
  Description of Artificial Sequence: Synthetic peptide
KALTDVVTL

SEQ ID NO: 2097 - protein, 9 aa, Artificial Sequence
  Description of Artificial Sequence: Synthetic peptide
KALGSGATL

SEQ ID NO: 2098 - protein, 8 aa, Artificial Sequence
  Description of Artificial Sequence: Synthetic peptide
GQGTGPTL

SEQ ID NO: 2099 - protein, 9 aa, Artificial Sequence
  Description of Artificial Sequence: Synthetic peptide
KALTDIVTL

SEQ ID NO: 2100 - protein, 9 aa, Artificial Sequence
  Description of Artificial Sequence: Synthetic peptide
DQNPPSVSL

SEQ ID NO: 2101 - protein, 10 aa, Artificial Sequence
  Description of Artificial Sequence: Synthetic peptide
VTFEPIPIHY

SEQ ID NO: 2102 - protein, 10 aa, Artificial Sequence
  Description of Artificial Sequence: Synthetic peptide
VSFEPIPIHY

SEQ ID NO: 2103 - protein, 9 aa, Artificial Sequence
  Description of Artificial Sequence: Synthetic peptide
AAVDLSHFL

SEQ ID NO: 2104 - protein, 10 aa, Artificial Sequence
  Description of Artificial Sequence: Synthetic peptide
RAKNPDIIIY

SEQ ID NO: 2105 - protein, 9 aa, Artificial Sequence
  Description of Artificial Sequence: Synthetic peptide
GAASITLTV

SEQ ID NO: 2106 - protein, 8 aa, Artificial Sequence
  Description of Artificial Sequence: Synthetic peptide
SYNITTEL

SEQ ID NO: 2107 - protein, 9 aa, Artificial Sequence
  Description of Artificial Sequence: Synthetic peptide
YFKNKTISF

SEQ ID NO: 2108 - protein, 8 aa, Artificial Sequence
  Description of Artificial Sequence: Synthetic peptide
SYNVTTVL

SEQ ID NO: 2109 - protein, 9 aa, Artificial Sequence
  Description of Artificial Sequence: Synthetic peptide
IYQEPFKNL

SEQ ID NO: 2110 - protein, 10 aa, Artificial Sequence
  Description of Artificial Sequence: Synthetic peptide
TYFKNKTISF

SEQ ID NO: 2111 - protein, 8 aa, Artificial Sequence
  Description of Artificial Sequence: Synthetic peptide
SFNMTTEL

SEQ ID NO: 2112 - protein, 9 aa, Artificial Sequence
  Description of Artificial Sequence: Synthetic peptide
VYYDPSKEL

SEQ ID NO: 2113 - protein, 10 aa, Artificial Sequence
  Description of Artificial Sequence: Synthetic peptide
GFLGTAGSTM

SEQ ID NO: 2114 - protein, 9 aa, Artificial Sequence
  Description of Artificial Sequence: Synthetic peptide
LYNTVATLY

SEQ ID NO: 2115 - protein, 8 aa, Artificial Sequence
  Description of Artificial Sequence: Synthetic peptide
LYNTVATL

SEQ ID NO: 2116 - protein, 9 aa, Artificial Sequence
  Description of Artificial Sequence: Synthetic peptide
TYQIYQEPF

SEQ ID NO: 2117 - protein, 8 aa, Artificial Sequence
  Description of Artificial Sequence: Synthetic peptide
VYNTQGYF

SEQ ID NO: 2118 - protein, 10 aa, Artificial Sequence
  Description of Artificial Sequence: Synthetic peptide
GFLGAAGSTM

SEQ ID NO: 2119 - protein, 10 aa, Artificial Sequence
  Description of Artificial Sequence: Synthetic peptide
IYQSMSPRTL

SEQ ID NO: 2120 - protein, 8 aa, Artificial Sequence
  Description of Artificial Sequence: Synthetic peptide
VYHTQGYF

SEQ ID NO: 2121 - protein, 9 aa, Artificial Sequence
  Description of Artificial Sequence: Synthetic peptide
LFNTVATLY

SEQ ID NO: 2122 - protein, 9 aa, Artificial Sequence
  Description of Artificial Sequence: Synthetic peptide
FYRLDIVQL

SEQ ID NO: 2123 - protein, 8 aa, Artificial Sequence
  Description of Artificial Sequence: Synthetic peptide
SYNITTEL

SEQ ID NO: 2124 - protein, 8 aa, Artificial Sequence
  Description of Artificial Sequence: Synthetic peptide
SYNVTTVL

SEQ ID NO: 2125 - protein, 8 aa, Artificial Sequence
  Description of Artificial Sequence: Synthetic peptide
LYNTVATL

SEQ ID NO: 2126 - protein, 8 aa, Artificial Sequence
  Description of Artificial Sequence: Synthetic peptide
SFNMTTEL

SEQ ID NO: 2127 - protein, 9 aa, Artificial Sequence
  Description of Artificial Sequence: Synthetic peptide
IYQEPFKNL

SEQ ID NO: 2128 - protein, 10 aa, Artificial Sequence
  Description of Artificial Sequence: Synthetic peptide
GFLGTAGSTM

SEQ ID NO: 2129 - protein, 9 aa, Artificial Sequence
  Description of Artificial Sequence: Synthetic peptide
VYYDPSKEL

SEQ ID NO: 2130 - protein, 10 aa, Artificial Sequence
  Description of Artificial Sequence: Synthetic peptide
GFLGAAGSTM

SEQ ID NO: 2131 - protein, 9 aa, Artificial Sequence
  Description of Artificial Sequence: Synthetic peptide
TYQIYQEPF

SEQ ID NO: 2132 - protein, 9 aa, Artificial Sequence
  Description of Artificial Sequence: Synthetic peptide
LYNTVATLY

SEQ ID NO: 2133 - protein, 8 aa, Artificial Sequence
  Description of Artificial Sequence: Synthetic peptide
VYNTQGYF

SEQ ID NO: 2134 - protein, 9 aa, Artificial Sequence
  Description of Artificial Sequence: Synthetic peptide
VSNITGLLL

SEQ ID NO: 2135 - protein, 9 aa, Artificial Sequence
  Description of Artificial Sequence: Synthetic peptide
RTLQQLLFV

SEQ ID NO: 2136 - protein, 9 aa, Artificial Sequence
  Description of Artificial Sequence: Synthetic peptide
KTELHAIYL

SEQ ID NO: 2137 - protein, 9 aa, Artificial Sequence
  Description of Artificial Sequence: Synthetic peptide
RVIETVQRL

SEQ ID NO: 2138 - protein, 9 aa, Artificial Sequence
  Description of Artificial Sequence: Synthetic peptide
GAASITLTV

SEQ ID NO: 2139 - protein, 9 aa, Artificial Sequence
  Description of Artificial Sequence: Synthetic peptide
NASWSNKSY

SEQ ID NO: 2140 - protein, 9 aa, Artificial Sequence
  Description of Artificial Sequence: Synthetic peptide
VSSGIRRVL

SEQ ID NO: 2141 - protein, 9 aa, Artificial Sequence
  Description of Artificial Sequence: Synthetic peptide
AAVDLSHFL

SEQ ID NO: 2142 - protein, 9 aa, Artificial Sequence
  Description of Artificial Sequence: Synthetic peptide
VSSGIRKVL

SEQ ID NO: 2143 - protein, 8 aa, Artificial Sequence
  Description of Artificial Sequence: Synthetic peptide
WANVKQEF

SEQ ID NO: 2144 - protein, 10 aa, Artificial Sequence
  Description of Artificial Sequence: Synthetic peptide
IATDIQTREL

SEQ ID NO: 2145 - protein, 9 aa, Artificial Sequence
  Description of Artificial Sequence: Synthetic peptide
NASWSNKSY

SEQ ID NO: 2146 - protein, 9 aa, Artificial Sequence
  Description of Artificial Sequence: Synthetic peptide
AAVDLSHFL

SEQ ID NO: 2147 - protein, 10 aa, Artificial Sequence
  Description of Artificial Sequence: Synthetic peptide
IATDIQTKEL

SEQ ID NO: 2148 - protein, 9 aa, Artificial Sequence
  Description of Artificial Sequence: Synthetic peptide
RASPAATGV

SEQ ID NO: 2149 - protein, 9 aa, Artificial Sequence
  Description of Artificial Sequence: Synthetic peptide
RAIEAQQHL

SEQ ID NO: 2150 - protein, 9 aa, Artificial Sequence
  Description of Artificial Sequence: Synthetic peptide
KALTDVVTL

SEQ ID NO: 2151 - protein, 9 aa, Artificial Sequence
  Description of Artificial Sequence: Synthetic peptide
RAIEAQQHM

SEQ ID NO: 2152 - protein, 9 aa, Artificial Sequence
  Description of Artificial Sequence: Synthetic peptide
GAASITLTV

SEQ ID NO: 2153 - protein, 9 aa, Artificial Sequence
  Description of Artificial Sequence: Synthetic peptide
ARVLAVESY

SEQ ID NO: 2154 - protein, 9 aa, Artificial Sequence
  Description of Artificial Sequence: Synthetic peptide
VRIGPGQTF

SEQ ID NO: 2155 - protein, 9 aa, Artificial Sequence
  Description of Artificial Sequence: Synthetic peptide
IRIGPGQSF

SEQ ID NO: 2156 - protein, 9 aa, Artificial Sequence
  Description of Artificial Sequence: Synthetic peptide
AAVDLSHFL

SEQ ID NO: 2157 - protein, 11 aa, Artificial Sequence
  Description of Artificial Sequence: Synthetic peptide
AEIQKQGQDQW

SEQ ID NO: 2158 - protein, 11 aa, Artificial Sequence
  Description of Artificial Sequence: Synthetic peptide
SEVNIVTDSQY

SEQ ID NO: 2159 - protein, 11 aa, Artificial Sequence
  Description of Artificial Sequence: Synthetic peptide
AEQATQEVKGW

SEQ ID NO: 2160 - protein, 10 aa, Artificial Sequence
  Description of Artificial Sequence: Synthetic peptide
VRIGPGQTFY

SEQ ID NO: 2161 - protein, 9 aa, Artificial Sequence
  Description of Artificial Sequence: Synthetic peptide
AAVDLSHFL

SEQ ID NO: 2162 - protein, 9 aa, Artificial Sequence
  Description of Artificial Sequence: Synthetic peptide
KALTDIVTL

SEQ ID NO: 2163 - protein, 9 aa, Artificial Sequence
  Description of Artificial Sequence: Synthetic peptide
KALTDVVTL

SEQ ID NO: 2164 - protein, 8 aa, Artificial Sequence
  Description of Artificial Sequence: Synthetic peptide
FALNPSLL

SEQ ID NO: 2165 - protein, 8 aa, Artificial Sequence
  Description of Artificial Sequence: Synthetic peptide
IAARTVEL

SEQ ID NO: 2166 - protein, 9 aa, Artificial Sequence
  Description of Artificial Sequence: Synthetic peptide
ATDLWVTVY

SEQ ID NO: 2167 - protein, 9 aa, Artificial Sequence
  Description of Artificial Sequence: Synthetic peptide
NTELIIYQY

SEQ ID NO: 2168 - protein, 10 aa, Artificial Sequence
  Description of Artificial Sequence: Synthetic peptide
STEEIKNCSY

SEQ ID NO: 2169 - protein, 9 aa, Artificial Sequence
  Description of Artificial Sequence: Synthetic peptide
GTEELKSLY

SEQ ID NO: 2170 - protein, 11 aa, Artificial Sequence
  Description of Artificial Sequence: Synthetic peptide
GTEKQGTTHSY

SEQ ID NO: 2171 - protein, 9 aa, Artificial Sequence
  Description of Artificial Sequence: Synthetic peptide
GTEELRSLY

SEQ ID NO: 2172 - protein, 10 aa, Artificial Sequence
  Description of Artificial Sequence: Synthetic peptide
PTETGQDTAY

SEQ ID NO: 2173 - protein, 10 aa, Artificial Sequence
  Description of Artificial Sequence: Synthetic peptide
ATDLWVTVYY

SEQ ID NO: 2174 - protein, 9 aa, Artificial Sequence
  Description of Artificial Sequence: Synthetic peptide
KLEEEQNKY

SEQ ID NO: 2175 - protein, 8 aa, Artificial Sequence
  Description of Artificial Sequence: Synthetic peptide
VLDVGDAY

SEQ ID NO: 2176 - protein, 9 aa, Artificial Sequence
  Description of Artificial Sequence: Synthetic peptide
NTSGSNTLY

SEQ ID NO: 2177 - protein, 10 aa, Artificial Sequence
  Description of Artificial Sequence: Synthetic peptide
VTVLDVGDAY

SEQ ID NO: 2178 - protein, 9 aa, Artificial Sequence
  Description of Artificial Sequence: Synthetic peptide
PTDPNPQEV

SEQ ID NO: 2179 - protein, 9 aa, Artificial Sequence
  Description of Artificial Sequence: Synthetic peptide
VLAEAMSQV

SEQ ID NO: 2180 - protein, 9 aa, Artificial Sequence
  Description of Artificial Sequence: Synthetic peptide
VLAEAMSHV

SEQ ID NO: 2181 - protein, 9 aa, Artificial Sequence
  Description of Artificial Sequence: Synthetic peptide
SLFGNDPLL

SEQ ID NO: 2182 - protein, 10 aa, Artificial Sequence
  Description of Artificial Sequence: Synthetic peptide
TLWNDTLQKV

SEQ ID NO: 2183 - protein, 9 aa, Artificial Sequence
  Description of Artificial Sequence: Synthetic peptide
ILKDPVHGV

SEQ ID NO: 2184 - protein, 9 aa, Artificial Sequence
  Description of Artificial Sequence: Synthetic peptide
VLAEAMSQI

SEQ ID NO: 2185 - protein, 9 aa, Artificial Sequence
  Description of Artificial Sequence: Synthetic peptide
SLYNTVVVL

SEQ ID NO: 2186 - protein, 9 aa, Artificial Sequence
  Description of Artificial Sequence: Synthetic peptide
ILAIVVWTV

SEQ ID NO: 2187 - protein, 9 aa, Artificial Sequence
  Description of Artificial Sequence: Synthetic peptide
SLAEGKVMI

SEQ ID NO: 2188 - protein, 9 aa, Artificial Sequence
  Description of Artificial Sequence: Synthetic peptide
SLLETETGC

SEQ ID NO: 2189 - protein, 9 aa, Artificial Sequence
  Description of Artificial Sequence: Synthetic peptide
QLTEAVQKI

SEQ ID NO: 2190 - protein, 9 aa, Artificial Sequence
  Description of Artificial Sequence: Synthetic peptide
LLDTIAVAV

SEQ ID NO: 2191 - protein, 10 aa, Artificial Sequence
  Description of Artificial Sequence: Synthetic peptide
TLWQRPLVTV

SEQ ID NO: 2192 - protein, 9 aa, Artificial Sequence
  Description of Artificial Sequence: Synthetic peptide
AIITVVNRV

SEQ ID NO: 2193 - protein, 10 aa, Artificial Sequence
  Description of Artificial Sequence: Synthetic peptide
HLDFGDVNNV

SEQ ID NO: 2194 - protein, 10 aa, Artificial Sequence
  Description of Artificial Sequence: Synthetic peptide
NLVDAIAVTV

SEQ ID NO: 2195 - protein, 10 aa, Artificial Sequence
  Description of Artificial Sequence: Synthetic peptide
SLAEGGKIMI

SEQ ID NO: 2196 - protein, 9 aa, Artificial Sequence
  Description of Artificial Sequence: Synthetic peptide
ALTDIVPLT

SEQ ID NO: 2197 - protein, 10 aa, Artificial Sequence
  Description of Artificial Sequence: Synthetic peptide
SLFDTIAVAV

SEQ ID NO: 2198 - protein, 10 aa, Artificial Sequence
  Description of Artificial Sequence: Synthetic peptide
KLVPVDPSEV

SEQ ID NO: 2199 - protein, 9 aa, Artificial Sequence
  Description of Artificial Sequence: Synthetic peptide
SINNETPGV

SEQ ID NO: 2200 - protein, 9 aa, Artificial Sequence
  Description of Artificial Sequence: Synthetic peptide
IVTDSQYAL

SEQ ID NO: 2201 - protein, 9 aa, Artificial Sequence
  Description of Artificial Sequence: Synthetic peptide
VLAEAMSQV

SEQ ID NO: 2202 - protein, 9 aa, Artificial Sequence
  Description of Artificial Sequence: Synthetic peptide
VLAEAMSHV

SEQ ID NO: 2203 - protein, 9 aa, Artificial Sequence
  Description of Artificial Sequence: Synthetic peptide
ILKDPVHGV

SEQ ID NO: 2204 - protein, 9 aa, Artificial Sequence
  Description of Artificial Sequence: Synthetic peptide
VLAEAMSQI

SEQ ID NO: 2205 - protein, 9 aa, Artificial Sequence
  Description of Artificial Sequence: Synthetic peptide
ILKNPVHGV

SEQ ID NO: 2206 - protein, 9 aa, Artificial Sequence
  Description of Artificial Sequence: Synthetic peptide
ILKTPVHGV

SEQ ID NO: 2207 - protein, 9 aa, Artificial Sequence
  Description of Artificial Sequence: Synthetic peptide
AIITVVNRV

SEQ ID NO: 2208 - protein, 9 aa, Artificial Sequence
  Description of Artificial Sequence: Synthetic peptide
TLNAWVKVV

SEQ ID NO: 2209 - protein, 9 aa, Artificial Sequence
  Description of Artificial Sequence: Synthetic peptide
ALKALVAST

SEQ ID NO: 2210 - protein, 10 aa, Artificial Sequence
  Description of Artificial Sequence: Synthetic peptide
TLWQRPLVTV

SEQ ID NO: 2211 - protein, 9 aa, Artificial Sequence
  Description of Artificial Sequence: Synthetic peptide
AIISVVKRV

SEQ ID NO: 2212 - protein, 10 aa, Artificial Sequence
  Description of Artificial Sequence: Synthetic peptide
YLKDQQLLGI

SEQ ID NO: 2213 - protein, 9 aa, Artificial Sequence
  Description of Artificial Sequence: Synthetic peptide
TLKKVVEQL

SEQ ID NO: 2214 - protein, 10 aa, Artificial Sequence
  Description of Artificial Sequence: Synthetic peptide
AMYAPPIAGV

SEQ ID NO: 2215 - protein, 9 aa, Artificial Sequence
  Description of Artificial Sequence: Synthetic peptide
VVKLEPLGV

SEQ ID NO: 2216 - protein, 9 aa, Artificial Sequence
  Description of Artificial Sequence: Synthetic peptide
ALKAVVAST

SEQ ID NO: 2217 - protein, 10 aa, Artificial Sequence
  Description of Artificial Sequence: Synthetic peptide
KLVPVNPSEV

SEQ ID NO: 2218 - protein, 10 aa, Artificial Sequence
  Description of Artificial Sequence: Synthetic peptide
TLWNDTLQKV

SEQ ID NO: 2219 - protein, 9 aa, Artificial Sequence
  Description of Artificial Sequence: Synthetic peptide
QLQARVLAV

SEQ ID NO: 2220 - protein, 9 aa, Artificial Sequence
  Description of Artificial Sequence: Synthetic peptide
GAASITLTV

SEQ ID NO: 2221 - protein, 10 aa, Artificial Sequence
  Description of Artificial Sequence: Synthetic peptide
KLVPVEPSEV

SEQ ID NO: 2222 - protein, 11 aa, Artificial Sequence
  Description of Artificial Sequence: Synthetic peptide
FLKEKGGLDGL

SEQ ID NO: 2223 - protein, 9 aa, Artificial Sequence
  Description of Artificial Sequence: Synthetic peptide
ALRALVAST

SEQ ID NO: 2224 - protein, 9 aa, Artificial Sequence
  Description of Artificial Sequence: Synthetic peptide
QLTEAVQKI

SEQ ID NO: 2225 - protein, 9 aa, Artificial Sequence
  Description of Artificial Sequence: Synthetic peptide
IVIAIISVV

SEQ ID NO: 2226 - protein, 9 aa, Artificial Sequence
  Description of Artificial Sequence: Synthetic peptide
ILAIVVWTV

SEQ ID NO: 2227 - protein, 9 aa, Artificial Sequence
  Description of Artificial Sequence: Synthetic peptide
ILRDKTQKV

SEQ ID NO: 2228 - protein, 9 aa, Artificial Sequence
  Description of Artificial Sequence: Synthetic peptide
VIFSVINRV

SEQ ID NO: 2229 - protein, 10 aa, Artificial Sequence
  Description of Artificial Sequence: Synthetic peptide
SLFDTIAVAV

SEQ ID NO: 2230 - protein, 9 aa, Artificial Sequence
  Description of Artificial Sequence: Synthetic peptide
SLFYRLDVV

SEQ ID NO: 2231 - protein, 9 aa, Artificial Sequence
  Description of Artificial Sequence: Synthetic peptide
SLAEGKVMI

SEQ ID NO: 2232 - protein, 9 aa, Artificial Sequence
  Description of Artificial Sequence: Synthetic peptide
RTKPPLPSV

SEQ ID NO: 2233 - protein, 10 aa, Artificial Sequence
  Description of Artificial Sequence: Synthetic peptide
KLVPVDPSEV

SEQ ID NO: 2234 - protein, 9 aa, Artificial Sequence
  Description of Artificial Sequence: Synthetic peptide
SIAARTVTL

SEQ ID NO: 2235 - protein, 9 aa, Artificial Sequence
  Description of Artificial Sequence: Synthetic peptide
SLYNTVVVL

SEQ ID NO: 2236 - protein, 9 aa, Artificial Sequence
  Description of Artificial Sequence: Synthetic peptide
ELKKIIGQV

SEQ ID NO: 2237 - protein, 9 aa, Artificial Sequence
  Description of Artificial Sequence: Synthetic peptide
SLFDTIAVA

SEQ ID NO: 2238 - protein, 8 aa, Artificial Sequence
  Description of Artificial Sequence: Synthetic peptide
IITVVNRV

SEQ ID NO: 2239 - protein, 9 aa, Artificial Sequence
  Description of Artificial Sequence: Synthetic peptide
KIIGDIRQA

SEQ ID NO: 2240 - protein, 9 aa, Artificial Sequence
  Description of Artificial Sequence: Synthetic peptide
IVFAIITVV

SEQ ID NO: 2241 - protein, 10 aa, Artificial Sequence
  Description of Artificial Sequence: Synthetic peptide
GLIGLRIVFA

SEQ ID NO: 2242 - protein, 10 aa, Artificial Sequence
  Description of Artificial Sequence: Synthetic peptide
YLQDQQLLGL

SEQ ID NO: 2243 - protein, 9 aa, Artificial Sequence
  Description of Artificial Sequence: Synthetic peptide
LIAARIVEL

SEQ ID NO: 2244 - protein, 9 aa, Artificial Sequence
  Description of Artificial Sequence: Synthetic peptide
VVKIEPLGI

SEQ ID NO: 2245 - protein, 10 aa, Artificial Sequence
  Description of Artificial Sequence: Synthetic peptide
AMYAPPIAGI

SEQ ID NO: 2246 - protein, 9 aa, Artificial Sequence
  Description of Artificial Sequence: Synthetic peptide
SLYNTIAVL

SEQ ID NO: 2247 - protein, 9 aa, Artificial Sequence
  Description of Artificial Sequence: Synthetic peptide
GAASLTLTV

SEQ ID NO: 2248 - protein, 9 aa, Artificial Sequence
  Description of Artificial Sequence: Synthetic peptide
GVGGHQISV

SEQ ID NO: 2249 - protein, 9 aa, Artificial Sequence
  Description of Artificial Sequence: Synthetic peptide
ILAIVVWTV

SEQ ID NO: 2250 - protein, 9 aa, Artificial Sequence
  Description of Artificial Sequence: Synthetic peptide
SITNWLWYI

SEQ ID NO: 2251 - protein, 9 aa, Artificial Sequence
  Description of Artificial Sequence: Synthetic peptide
SLFGNDPLL

SEQ ID NO: 2252 - protein, 9 aa, Artificial Sequence
  Description of Artificial Sequence: Synthetic peptide
TLNAWVKVV

SEQ ID NO: 2253 - protein, 9 aa, Artificial Sequence
  Description of Artificial Sequence: Synthetic peptide
ILKDPVHGV

SEQ ID NO: 2254 - protein, 9 aa, Artificial Sequence
  Description of Artificial Sequence: Synthetic peptide
SLYNTVVVL

SEQ ID NO: 2255 - protein, 9 aa, Artificial Sequence
  Description of Artificial Sequence: Synthetic peptide
LLLYWGREL

SEQ ID NO: 2256 - protein, 10 aa, Artificial Sequence
  Description of Artificial Sequence: Synthetic peptide
TLWNDTLQKV

SEQ ID NO: 2257 - protein, 10 aa, Artificial Sequence
  Description of Artificial Sequence: Synthetic peptide
YLQDQQLLGL

SEQ ID NO: 2258 - protein, 9 aa, Artificial Sequence
  Description of Artificial Sequence: Synthetic peptide
VIFSVINRV

SEQ ID NO: 2259 - protein, 9 aa, Artificial Sequence
  Description of Artificial Sequence: Synthetic peptide
AIITVVNRV

SEQ ID NO: 2260 - protein, 9 aa, Artificial Sequence
  Description of Artificial Sequence: Synthetic peptide
ILAIVVWTI

SEQ ID NO: 2261 - protein, 10 aa, Artificial Sequence
  Description of Artificial Sequence: Synthetic peptide
TLWQRPLVTV

SEQ ID NO: 2262 - protein, 9 aa, Artificial Sequence
  Description of Artificial Sequence: Synthetic peptide
IVNQIIEKL

SEQ ID NO: 2263 - protein, 9 aa, Artificial Sequence
  Description of Artificial Sequence: Synthetic peptide
SLYNTIAVL

SEQ ID NO: 2264 - protein, 9 aa, Artificial Sequence
  Description of Artificial Sequence: Synthetic peptide
SITEWNATL

SEQ ID NO: 2265 - protein, 9 aa, Artificial Sequence
  Description of Artificial Sequence: Synthetic peptide
NISHWLWYI

SEQ ID NO: 2266 - protein, 9 aa, Artificial Sequence
  Description of Artificial Sequence: Synthetic peptide
AVAEWTDRV

SEQ ID NO: 2267 - protein, 9 aa, Artificial Sequence
  Description of Artificial Sequence: Synthetic peptide
LLVYWGQEL

SEQ ID NO: 2268 - protein, 9 aa, Artificial Sequence
  Description of Artificial Sequence: Synthetic peptide
TLQKVVKQL

SEQ ID NO: 2269 - protein, 9 aa, Artificial Sequence
  Description of Artificial Sequence: Synthetic peptide
ILKNPVHGV

SEQ ID NO: 2270 - protein, 10 aa, Artificial Sequence
  Description of Artificial Sequence: Synthetic peptide
RLLDTIAVAV

SEQ ID NO: 2271 - protein, 9 aa, Artificial Sequence
  Description of Artificial Sequence: Synthetic peptide
LVNQIIEKL

SEQ ID NO: 2272 - protein, 10 aa, Artificial Sequence
  Description of Artificial Sequence: Synthetic peptide
ILIAARIVEL

SEQ ID NO: 2273 - protein, 9 aa, Artificial Sequence
  Description of Artificial Sequence: Synthetic peptide
AIVGLIVAL

SEQ ID NO: 2274 - protein, 9 aa, Artificial Sequence
  Description of Artificial Sequence: Synthetic peptide
SLLQAIRTI

SEQ ID NO: 2275 - protein, 10 aa, Artificial Sequence
  Description of Artificial Sequence: Synthetic peptide
SLFDTIAVAV

SEQ ID NO: 2276 - protein, 9 aa, Artificial Sequence
  Description of Artificial Sequence: Synthetic peptide
RLVNGFFAL

SEQ ID NO: 2277 - protein, 9 aa, Artificial Sequence
  Description of Artificial Sequence: Synthetic peptide
ILKTPVHGV

SEQ ID NO: 2278 - protein, 9 aa, Artificial Sequence
  Description of Artificial Sequence: Synthetic peptide
AILNIPTRI

SEQ ID NO: 2279 - protein, 9 aa, Artificial Sequence
  Description of Artificial Sequence: Synthetic peptide
TLKKVVEQL

SEQ ID NO: 2280 - protein, 9 aa, Artificial Sequence
  Description of Artificial Sequence: Synthetic peptide
LIAARIVEL

SEQ ID NO: 2281 - protein, 9 aa, Artificial Sequence
  Description of Artificial Sequence: Synthetic peptide
ALTDIVPLT

SEQ ID NO: 2282 - protein, 9 aa, Artificial Sequence
  Description of Artificial Sequence: Synthetic peptide
KVYSLFYRL

SEQ ID NO: 2283 - protein, 9 aa, Artificial Sequence
  Description of Artificial Sequence: Synthetic peptide
VIIRYLQQL

SEQ ID NO: 2284 - protein, 9 aa, Artificial Sequence
  Description of Artificial Sequence: Synthetic peptide
SLFYRLDVV

SEQ ID NO: 2285 - protein, 9 aa, Artificial Sequence
  Description of Artificial Sequence: Synthetic peptide
VLAEAMSHV

SEQ ID NO: 2286 - protein, 9 aa, Artificial Sequence
  Description of Artificial Sequence: Synthetic peptide
VLAEAMSQV

SEQ ID NO: 2287 - protein, 9 aa, Artificial Sequence
  Description of Artificial Sequence: Synthetic peptide
VIWGKIPKF

SEQ ID NO: 2288 - protein, 10 aa, Artificial Sequence
  Description of Artificial Sequence: Synthetic peptide
KLIEKERVYL

SEQ ID NO: 2289 - protein, 9 aa, Artificial Sequence
  Description of Artificial Sequence: Synthetic peptide
AIIRYLQQL

SEQ ID NO: 2290 - protein, 9 aa, Artificial Sequence
  Description of Artificial Sequence: Synthetic peptide
AIISVVKRV

SEQ ID NO: 2291 - protein, 9 aa, Artificial Sequence
  Description of Artificial Sequence: Synthetic peptide
HLEGKIIVV

SEQ ID NO: 2292 - protein, 11 aa, Artificial Sequence
  Description of Artificial Sequence: Synthetic peptide
SLFYRLDVVQL

SEQ ID NO: 2293 - protein, 9 aa, Artificial Sequence
  Description of Artificial Sequence: Synthetic peptide
NTIAVLYYV

SEQ ID NO: 2294 - protein, 9 aa, Artificial Sequence
  Description of Artificial Sequence: Synthetic peptide
TYTDIIYML

SEQ ID NO: 2295 - protein, 9 aa, Artificial Sequence
  Description of Artificial Sequence: Synthetic peptide
IVTDSQYAL

SEQ ID NO: 2296 - protein, 9 aa, Artificial Sequence
  Description of Artificial Sequence: Synthetic peptide
HLEGKVILV

SEQ ID NO: 2297 - protein, 9 aa, Artificial Sequence
  Description of Artificial Sequence: Synthetic peptide
KVYSLFYEL

SEQ ID NO: 2298 - protein, 11 aa, Artificial Sequence
  Description of Artificial Sequence: Synthetic peptide
SLFYKLDIVQI

SEQ ID NO: 2299 - protein, 9 aa, Artificial Sequence
  Description of Artificial Sequence: Synthetic peptide
RIVFAIITV

SEQ ID NO: 2300 - protein, 9 aa, Artificial Sequence
  Description of Artificial Sequence: Synthetic peptide
LVNQIIEEL

SEQ ID NO: 2301 - protein, 9 aa, Artificial Sequence
  Description of Artificial Sequence: Synthetic peptide
RILQQLLFV

SEQ ID NO: 2302 - protein, 9 aa, Artificial Sequence
  Description of Artificial Sequence: Synthetic peptide
NYTNIIYRL

SEQ ID NO: 2303 - protein, 9 aa, Artificial Sequence
  Description of Artificial Sequence: Synthetic peptide
RTKPPLPSV

SEQ ID NO: 2304 - protein, 9 aa, Artificial Sequence
  Description of Artificial Sequence: Synthetic peptide
KALTDIVTL

SEQ ID NO: 2305 - protein, 9 aa, Artificial Sequence
  Description of Artificial Sequence: Synthetic peptide
KIIVVAVHV

SEQ ID NO: 2306 - protein, 10 aa, Artificial Sequence
  Description of Artificial Sequence: Synthetic peptide
NLVDAIAVTV

SEQ ID NO: 2307 - protein, 9 aa, Artificial Sequence
  Description of Artificial Sequence: Synthetic peptide
HLWRWGILI

SEQ ID NO: 2308 - protein, 9 aa, Artificial Sequence
  Description of Artificial Sequence: Synthetic peptide
NYTETIYKL

SEQ ID NO: 2309 - protein, 10 aa, Artificial Sequence
  Description of Artificial Sequence: Synthetic peptide
NLLVYWGQEL

SEQ ID NO: 2310 - protein, 9 aa, Artificial Sequence
  Description of Artificial Sequence: Synthetic peptide
WMLELLEEL

SEQ ID NO: 2311 - protein, 11 aa, Artificial Sequence
  Description of Artificial Sequence: Synthetic peptide
VQLGIPHPAGL

SEQ ID NO: 2312 - protein, 10 aa, Artificial Sequence
  Description of Artificial Sequence: Synthetic peptide
RTQDFWEVQL

SEQ ID NO: 2313 - protein, 10 aa, Artificial Sequence
  Description of Artificial Sequence: Synthetic peptide
KLVPVEPSEV

SEQ ID NO: 2314 - protein, 9 aa, Artificial Sequence
  Description of Artificial Sequence: Synthetic peptide
SINNETPGV

SEQ ID NO: 2315 - protein, 9 aa, Artificial Sequence
  Description of Artificial Sequence: Synthetic peptide
SLFDTIAVA

SEQ ID NO: 2316 - protein, 10 aa, Artificial Sequence
  Description of Artificial Sequence: Synthetic peptide
YLQDQQLLGI

SEQ ID NO: 2317 - protein, 9 aa, Artificial Sequence
  Description of Artificial Sequence: Synthetic peptide
SLFYKLDIV

SEQ ID NO: 2318 - protein, 10 aa, Artificial Sequence
  Description of Artificial Sequence: Synthetic peptide
KLVPVNPSEV

SEQ ID NO: 2319 - protein, 9 aa, Artificial Sequence
  Description of Artificial Sequence: Synthetic peptide
DLADHLIHL

SEQ ID NO: 2320 - protein, 8 aa, Artificial Sequence
  Description of Artificial Sequence: Synthetic peptide
SLFDTIAV

SEQ ID NO: 2321 - protein, 9 aa, Artificial Sequence
  Description of Artificial Sequence: Synthetic peptide
IINLWDQSL

SEQ ID NO: 2322 - protein, 8 aa, Artificial Sequence
  Description of Artificial Sequence: Synthetic peptide
ALTDIVTL

SEQ ID NO: 2323 - protein, 9 aa, Artificial Sequence
  Description of Artificial Sequence: Synthetic peptide
KLTPLCVTL

SEQ ID NO: 2324 - protein, 9 aa, Artificial Sequence
  Description of Artificial Sequence: Synthetic peptide
LLDTIAVAV

SEQ ID NO: 2325 - protein, 10 aa, Artificial Sequence
  Description of Artificial Sequence: Synthetic peptide
ILIAARTVEL

SEQ ID NO: 2326 - protein, 9 aa, Artificial Sequence
  Description of Artificial Sequence: Synthetic peptide
VLAEAMSQI

SEQ ID NO: 2327 - protein, 9 aa, Artificial Sequence
  Description of Artificial Sequence: Synthetic peptide
TQSPINEEI

SEQ ID NO: 2328 - protein, 9 aa, Artificial Sequence
  Description of Artificial Sequence: Synthetic peptide
AIITVVNRV

SEQ ID NO: 2329 - protein, 9 aa, Artificial Sequence
  Description of Artificial Sequence: Synthetic peptide
AVAEWTDRV

SEQ ID NO: 2330 - protein, 11 aa, Artificial Sequence
  Description of Artificial Sequence: Synthetic peptide
TQIDPDLADHL

SEQ ID NO: 2331 - protein, 9 aa, Artificial Sequence
  Description of Artificial Sequence: Synthetic peptide
NIIGDIRQA

SEQ ID NO: 2332 - protein, 9 aa, Artificial Sequence
  Description of Artificial Sequence: Synthetic peptide
VQINSTDNV

SEQ ID NO: 2333 - protein, 9 aa, Artificial Sequence
  Description of Artificial Sequence: Synthetic peptide
KAIEAQQQL

SEQ ID NO: 2334 - protein, 9 aa, Artificial Sequence
  Description of Artificial Sequence: Synthetic peptide
VLAEAMSQV

SEQ ID NO: 2335 - protein, 9 aa, Artificial Sequence
  Description of Artificial Sequence: Synthetic peptide
TVAEGTDRV

SEQ ID NO: 2336 - protein, 9 aa, Artificial Sequence
  Description of Artificial Sequence: Synthetic peptide
VLAEAMSHV

SEQ ID NO: 2337 - protein, 9 aa, Artificial Sequence
  Description of Artificial Sequence: Synthetic peptide
KIIGDIRQA

SEQ ID NO: 2338 - protein, 9 aa, Artificial Sequence
  Description of Artificial Sequence: Synthetic peptide
GAVDLSHFL

SEQ ID NO: 2339 - protein, 9 aa, Artificial Sequence
  Description of Artificial Sequence: Synthetic peptide
IVNQIIEKL

SEQ ID NO: 2340 - protein, 11 aa, Artificial Sequence
  Description of Artificial Sequence: Synthetic peptide
VVIQDNSDIKV

SEQ ID NO: 2341 - protein, 9 aa, Artificial Sequence
  Description of Artificial Sequence: Synthetic peptide
VLAEAMSQI

SEQ ID NO: 2342 - protein, 9 aa, Artificial Sequence
  Description of Artificial Sequence: Synthetic peptide
VQFTEPVQI

SEQ ID NO: 2343 - protein, 11 aa, Artificial Sequence
  Description of Artificial Sequence: Synthetic peptide
VVIQDNGDIKV

SEQ ID NO: 2344 - protein, 9 aa, Artificial Sequence
  Description of Artificial Sequence: Synthetic peptide
SAISLFDTI

SEQ ID NO: 2345 - protein, 9 aa, Artificial Sequence
  Description of Artificial Sequence: Synthetic peptide
WTVNDIQKL

SEQ ID NO: 2346 - protein, 9 aa, Artificial Sequence
  Description of Artificial Sequence: Synthetic peptide
QAIEAQQHL

SEQ ID NO: 2347 - protein, 9 aa, Artificial Sequence
  Description of Artificial Sequence: Synthetic peptide
SAVNLVDAI

SEQ ID NO: 2348 - protein, 9 aa, Artificial Sequence
  Description of Artificial Sequence: Synthetic peptide
ATLEEMMTA

SEQ ID NO: 2349 - protein, 9 aa, Artificial Sequence
  Description of Artificial Sequence: Synthetic peptide
GAASITLTV

SEQ ID NO: 2350 - protein, 9 aa, Artificial Sequence
  Description of Artificial Sequence: Synthetic peptide
IVTDSQYAL

SEQ ID NO: 2351 - protein, 9 aa, Artificial Sequence
  Description of Artificial Sequence: Synthetic peptide
EIIGDIRQA

SEQ ID NO: 2352 - protein, 9 aa, Artificial Sequence
  Description of Artificial Sequence: Synthetic peptide
KAADLWVTV

SEQ ID NO: 2353 - protein, 9 aa, Artificial Sequence
  Description of Artificial Sequence: Synthetic peptide
SQVQNTNIM

SEQ ID NO: 2354 - protein, 9 aa, Artificial Sequence
  Description of Artificial Sequence: Synthetic peptide
SQIYAGIQV

SEQ ID NO: 2355 - protein, 9 aa, Artificial Sequence
  Description of Artificial Sequence: Synthetic peptide
ILKDPVHGV

SEQ ID NO: 2356 - protein, 9 aa, Artificial Sequence
  Description of Artificial Sequence: Synthetic peptide
RVIEIGQRA

SEQ ID NO: 2357 - protein, 9 aa, Artificial Sequence
  Description of Artificial Sequence: Synthetic peptide
EQVDKLVSC

SEQ ID NO: 2358 - protein, 9 aa, Artificial Sequence
  Description of Artificial Sequence: Synthetic peptide
GQAFYTNEI

SEQ ID NO: 2359 - protein, 9 aa, Artificial Sequence
  Description of Artificial Sequence: Synthetic peptide
ASITLTVQA

SEQ ID NO: 2360 - protein, 10 aa, Artificial Sequence
  Description of Artificial Sequence: Synthetic peptide
SQYALGIIQA

SEQ ID NO: 2361 - protein, 10 aa, Artificial Sequence
  Description of Artificial Sequence: Synthetic peptide
SQIHSTNQNV

SEQ ID NO: 2362 - protein, 9 aa, Artificial Sequence
  Description of Artificial Sequence: Synthetic peptide
SLFGNDPLL

SEQ ID NO: 2363 - protein, 9 aa, Artificial Sequence
  Description of Artificial Sequence: Synthetic peptide
RVIELGQRI

SEQ ID NO: 2364 - protein, 9 aa, Artificial Sequence
  Description of Artificial Sequence: Synthetic peptide
SQIYAGIKV

SEQ ID NO: 2365 - protein, 9 aa, Artificial Sequence
  Description of Artificial Sequence: Synthetic peptide
IVIAIISVV

SEQ ID NO: 2366 - protein, 9 aa, Artificial Sequence
  Description of Artificial Sequence: Synthetic peptide
AIVGLIVAL

SEQ ID NO: 2367 - protein, 9 aa, Artificial Sequence
  Description of Artificial Sequence: Synthetic peptide
LEKEPIAGA

SEQ ID NO: 2368 - protein, 9 aa, Artificial Sequence
  Description of Artificial Sequence: Synthetic peptide
KAIEAQQQM

SEQ ID NO: 2369 - protein, 9 aa, Artificial Sequence
  Description of Artificial Sequence: Synthetic peptide
QLTEAVQKI

SEQ ID NO: 2370 - protein, 9 aa, Artificial Sequence
  Description of Artificial Sequence: Synthetic peptide
TQGENNSLL

SEQ ID NO: 2371 - protein, 9 aa, Artificial Sequence
  Description of Artificial Sequence: Synthetic peptide
LVNQIIEKL

SEQ ID NO: 2372 - protein, 9 aa, Artificial Sequence
  Description of Artificial Sequence: Synthetic peptide
SIAARTVTL

SEQ ID NO: 2373 - protein, 9 aa, Artificial Sequence
  Description of Artificial Sequence: Synthetic peptide
IEVKDTKEA

SEQ ID NO: 2374 - protein, 9 aa, Artificial Sequence
  Description of Artificial Sequence: Synthetic peptide
ATSNLQEQI

SEQ ID NO: 2375 - protein, 9 aa, Artificial Sequence
  Description of Artificial Sequence: Synthetic peptide
FTSAAVKAA

SEQ ID NO: 2376 - protein, 9 aa, Artificial Sequence
  Description of Artificial Sequence: Synthetic peptide
SEVGFPVRP

SEQ ID NO: 2377 - protein, 10 aa, Artificial Sequence
  Description of Artificial Sequence: Synthetic peptide
KAYDTEVHNV

SEQ ID NO: 2378 - protein, 9 aa, Artificial Sequence
  Description of Artificial Sequence: Synthetic peptide
LVNQIIEEL

SEQ ID NO: 2379 - protein, 10 aa, Artificial Sequence
  Description of Artificial Sequence: Synthetic peptide
RQIDSISERV

SEQ ID NO: 2380 - protein, 11 aa, Artificial Sequence
  Description of Artificial Sequence: Synthetic peptide
VVIQDNGDIKV

SEQ ID NO: 2381 - protein, 9 aa, Artificial Sequence
  Description of Artificial Sequence: Synthetic peptide
AIITVVNRV

SEQ ID NO: 2382 - protein, 9 aa, Artificial Sequence
  Description of Artificial Sequence: Synthetic peptide
IQDNGDIKV

SEQ ID NO: 2383 - protein, 9 aa, Artificial Sequence
  Description of Artificial Sequence: Synthetic peptide
IVTDSQYAL

SEQ ID NO: 2384 - protein, 9 aa, Artificial Sequence
  Description of Artificial Sequence: Synthetic peptide
IQDNSDIKV

SEQ ID NO: 2385 - protein, 11 aa, Artificial Sequence
  Description of Artificial Sequence: Synthetic peptide
VVIQDNSDIKV

SEQ ID NO: 2386 - protein, 9 aa, Artificial Sequence
  Description of Artificial Sequence: Synthetic peptide
SAISLFDTI

SEQ ID NO: 2387 - protein, 9 aa, Artificial Sequence
  Description of Artificial Sequence: Synthetic peptide
VLAEAMSQV

SEQ ID NO: 2388 - protein, 9 aa, Artificial Sequence
  Description of Artificial Sequence: Synthetic peptide
KAIEAQQQL

SEQ ID NO: 2389 - protein, 9 aa, Artificial Sequence
  Description of Artificial Sequence: Synthetic peptide
SQIYAGIKV

SEQ ID NO: 2390 - protein, 9 aa, Artificial Sequence
  Description of Artificial Sequence: Synthetic peptide
VQINSTDNV

SEQ ID NO: 2391 - protein, 9 aa, Artificial Sequence
  Description of Artificial Sequence: Synthetic peptide
TQSPINEEI

SEQ ID NO: 2392 - protein, 9 aa, Artificial Sequence
  Description of Artificial Sequence: Synthetic peptide
SQIYAGIQV

SEQ ID NO: 2393 - protein, 9 aa, Artificial Sequence
  Description of Artificial Sequence: Synthetic peptide
AVAEWTDRV

SEQ ID NO: 2394 - protein, 9 aa, Artificial Sequence
  Description of Artificial Sequence: Synthetic peptide
AIVGLIVAL

SEQ ID NO: 2395 - protein, 9 aa, Artificial Sequence
  Description of Artificial Sequence: Synthetic peptide
GGIGGFIKV

SEQ ID NO: 2396 - protein, 9 aa, Artificial Sequence
  Description of Artificial Sequence: Synthetic peptide
YSTQIDPDL

SEQ ID NO: 2397 - protein, 9 aa, Artificial Sequence
  Description of Artificial Sequence: Synthetic peptide
RTPPAAEGV

SEQ ID NO: 2398 - protein, 9 aa, Artificial Sequence
  Description of Artificial Sequence: Synthetic peptide
KALTDIVTL

SEQ ID NO: 2399 - protein, 9 aa, Artificial Sequence
  Description of Artificial Sequence: Synthetic peptide
AVSPAAPGV

SEQ ID NO: 2400 - protein, 9 aa, Artificial Sequence
  Description of Artificial Sequence: Synthetic peptide
TVAEGTDRV

SEQ ID NO: 2401 - protein, 9 aa, Artificial Sequence
  Description of Artificial Sequence: Synthetic peptide
VLAEAMSHV

SEQ ID NO: 2402 - protein, 10 aa, Artificial Sequence
  Description of Artificial Sequence: Synthetic peptide
TVLDVGDAYF

SEQ ID NO: 2403 - protein, 9 aa, Artificial Sequence
  Description of Artificial Sequence: Synthetic peptide
SLFGNDPLL

SEQ ID NO: 2404 - protein, 9 aa, Artificial Sequence
  Description of Artificial Sequence: Synthetic peptide
IVIAIISVV

SEQ ID NO: 2405 - protein, 9 aa, Artificial Sequence
  Description of Artificial Sequence: Synthetic peptide
GAVDLSHFL

SEQ ID NO: 2406 - protein, 11 aa, Artificial Sequence
  Description of Artificial Sequence: Synthetic peptide
TQIDPDLADHL

SEQ ID NO: 2407 - protein, 9 aa, Artificial Sequence
  Description of Artificial Sequence: Synthetic peptide
RVIELGQRI

SEQ ID NO: 2408 - protein, 9 aa, Artificial Sequence
  Description of Artificial Sequence: Synthetic peptide
NIIGDIRQA

SEQ ID NO: 2409 - protein, 9 aa, Artificial Sequence
  Description of Artificial Sequence: Synthetic peptide
VLAEAMSQI

SEQ ID NO: 2410 - protein, 9 aa, Artificial Sequence
  Description of Artificial Sequence: Synthetic peptide
LVDAIAVTV

SEQ ID NO: 2411 - protein, 9 aa, Artificial Sequence
  Description of Artificial Sequence: Synthetic peptide
GAASITLTV

SEQ ID NO: 2412 - protein, 9 aa, Artificial Sequence
  Description of Artificial Sequence: Synthetic peptide
HQISVESSV

SEQ ID NO: 2413 - protein, 9 aa, Artificial Sequence
  Description of Artificial Sequence: Synthetic peptide
SAVNLVDAI

SEQ ID NO: 2414 - protein, 9 aa, Artificial Sequence
  Description of Artificial Sequence: Synthetic peptide
KIIGDIRQA

SEQ ID NO: 2415 - protein, 9 aa, Artificial Sequence
  Description of Artificial Sequence: Synthetic peptide
YQLEQEPIV

SEQ ID NO: 2416 - protein, 9 aa, Artificial Sequence
  Description of Artificial Sequence: Synthetic peptide
QLTEAVQKI

SEQ ID NO: 2417 - protein, 9 aa, Artificial Sequence
  Description of Artificial Sequence: Synthetic peptide
QAIEAQQHL

SEQ ID NO: 2418 - protein, 9 aa, Artificial Sequence
  Description of Artificial Sequence: Synthetic peptide
VQFTEPVQI

SEQ ID NO: 2419 - protein, 9 aa, Artificial Sequence
  Description of Artificial Sequence: Synthetic peptide
SAIRLLDTI

SEQ ID NO: 2420 - protein, 9 aa, Artificial Sequence
  Description of Artificial Sequence: Synthetic peptide
KATDLWVTV

SEQ ID NO: 2421 - protein, 9 aa, Artificial Sequence
  Description of Artificial Sequence: Synthetic peptide
EQVDKLVSC

SEQ ID NO: 2422 - protein, 9 aa, Artificial Sequence
  Description of Artificial Sequence: Synthetic peptide
LVDAIAVTV

SEQ ID NO: 2423 - protein, 9 aa, Artificial Sequence
  Description of Artificial Sequence: Synthetic peptide
LLDTIAVAV

SEQ ID NO: 2424 - protein, 9 aa, Artificial Sequence
  Description of Artificial Sequence: Synthetic peptide
YVDRFFKTL

SEQ ID NO: 2425 - protein, 10 aa, Artificial Sequence
  Description of Artificial Sequence: Synthetic peptide
TLWQRPLVTV

SEQ ID NO: 2426 - protein, 9 aa, Artificial Sequence
  Description of Artificial Sequence: Synthetic peptide
ILKDPVHGV

SEQ ID NO: 2427 - protein, 9 aa, Artificial Sequence
  Description of Artificial Sequence: Synthetic peptide
QIDSISERV

SEQ ID NO: 2428 - protein, 9 aa, Artificial Sequence
  Description of Artificial Sequence: Synthetic peptide
VLAEAMSHV

SEQ ID NO: 2429 - protein, 10 aa, Artificial Sequence
  Description of Artificial Sequence: Synthetic peptide
TLWNDTLQKV

SEQ ID NO: 2430 - protein, 9 aa, Artificial Sequence
  Description of Artificial Sequence: Synthetic peptide
AIITVVNRV

SEQ ID NO: 2431 - protein, 9 aa, Artificial Sequence
  Description of Artificial Sequence: Synthetic peptide
ALPVGTEEL

SEQ ID NO: 2432 - protein, 9 aa, Artificial Sequence
  Description of Artificial Sequence: Synthetic peptide
VIFSVINRV

SEQ ID NO: 2433 - protein, 9 aa, Artificial Sequence
  Description of Artificial Sequence: Synthetic peptide
FSPEVIPMF

SEQ ID NO: 2434 - protein, 9 aa, Artificial Sequence
  Description of Artificial Sequence: Synthetic peptide
KIDWLLERI

SEQ ID NO: 2435 - protein, 9 aa, Artificial Sequence
  Description of Artificial Sequence: Synthetic peptide
VLAEAMSQV

SEQ ID NO: 2436 - protein, 9 aa, Artificial Sequence
  Description of Artificial Sequence: Synthetic peptide
SLFGNDPLL

SEQ ID NO: 2437 - protein, 9 aa, Artificial Sequence
  Description of Artificial Sequence: Synthetic peptide
YTDIIYMLL

SEQ ID NO: 2438 - protein, 9 aa, Artificial Sequence
  Description of Artificial Sequence: Synthetic peptide
HLEGKVILV

SEQ ID NO: 2439 - protein, 9 aa, Artificial Sequence
  Description of Artificial Sequence: Synthetic peptide
KIIGDIRQA

SEQ ID NO: 2440 - protein, 9 aa, Artificial Sequence
  Description of Artificial Sequence: Synthetic peptide
AIITVVNRV

SEQ ID NO: 2441 - protein, 9 aa, Artificial Sequence
  Description of Artificial Sequence: Synthetic peptide
IVNQIIEKL

SEQ ID NO: 2442 - protein, 9 aa, Artificial Sequence
  Description of Artificial Sequence: Synthetic peptide
KAIEAQQQL

SEQ ID NO: 2443 - protein, 9 aa, Artificial Sequence
  Description of Artificial Sequence: Synthetic peptide
RTPPAAEGV

SEQ ID NO: 2444 - protein, 9 aa, Artificial Sequence
  Description of Artificial Sequence: Synthetic peptide
WTVNDIQKL

SEQ ID NO: 2445 - protein, 9 aa, Artificial Sequence
  Description of Artificial Sequence: Synthetic peptide
AIVRILQQL

SEQ ID NO: 2446 - protein, 10 aa, Artificial Sequence
  Description of Artificial Sequence: Synthetic peptide
KAYDTEVHNV

SEQ ID NO: 2447 - protein, 10 aa, Artificial Sequence
  Description of Artificial Sequence: Synthetic peptide
SQIHSTNQNV

SEQ ID NO: 2448 - protein, 9 aa, Artificial Sequence
  Description of Artificial Sequence: Synthetic peptide
ILKDPVHGV

SEQ ID NO: 2449 - protein, 9 aa, Artificial Sequence
  Description of Artificial Sequence: Synthetic peptide
EIIGDIRQA

SEQ ID NO: 2450 - protein, 9 aa, Artificial Sequence
  Description of Artificial Sequence: Synthetic peptide
KAIEAQQQM

SEQ ID NO: 2451 - protein, 11 aa, Artificial Sequence
  Description of Artificial Sequence: Synthetic peptide
VVIQDNGDIKV

SEQ ID NO: 2452 - protein, 11 aa, Artificial Sequence
  Description of Artificial Sequence: Synthetic peptide
RTPPAAEGVGA

SEQ ID NO: 2453 - protein, 9 aa, Artificial Sequence
  Description of Artificial Sequence: Synthetic peptide
RTKPPLPSV

SEQ ID NO: 2454 - protein, 10 aa, Artificial Sequence
  Description of Artificial Sequence: Synthetic peptide
RVIEIGQRAC

SEQ ID NO: 2455 - protein, 9 aa, Artificial Sequence
  Description of Artificial Sequence: Synthetic peptide
RVIEIGQRA

SEQ ID NO: 2456 - protein, 9 aa, Artificial Sequence
  Description of Artificial Sequence: Synthetic peptide
LVNQIIEKL

SEQ ID NO: 2457 - protein, 10 aa, Artificial Sequence
  Description of Artificial Sequence: Synthetic peptide
KAIEAQQQML

SEQ ID NO: 2458 - protein, 9 aa, Artificial Sequence
  Description of Artificial Sequence: Synthetic peptide
AIVGLIVAL

SEQ ID NO: 2459 - protein, 9 aa, Artificial Sequence
  Description of Artificial Sequence: Synthetic peptide
VLAEAMSQV

SEQ ID NO: 2460 - protein, 9 aa, Artificial Sequence
  Description of Artificial Sequence: Synthetic peptide
NIIGDIRQA

SEQ ID NO: 2461 - protein, 9 aa, Artificial Sequence
  Description of Artificial Sequence: Synthetic peptide
TQSPINEEI

SEQ ID NO: 2462 - protein, 10 aa, Artificial Sequence
  Description of Artificial Sequence: Synthetic peptide
RVLAEAMSQV

SEQ ID NO: 2463 - protein, 11 aa, Artificial Sequence
  Description of Artificial Sequence: Synthetic peptide
VVIQDNSDIKV

SEQ ID NO: 2464 - protein, 9 aa, Artificial Sequence
  Description of Artificial Sequence: Synthetic peptide
AIISVVKRV

SEQ ID NO: 2465 - protein, 9 aa, Artificial Sequence
  Description of Artificial Sequence: Synthetic peptide
RVIELGQRI

SEQ ID NO: 2466 - protein, 9 aa, Artificial Sequence
  Description of Artificial Sequence: Synthetic peptide
IEVKDTKEA

SEQ ID NO: 2467 - protein, 9 aa, Artificial Sequence
  Description of Artificial Sequence: Synthetic peptide
QIHSTNQNV

SEQ ID NO: 2468 - protein, 10 aa, Artificial Sequence
  Description of Artificial Sequence: Synthetic peptide
KVVKLEPLGV

SEQ ID NO: 2469 - protein, 10 aa, Artificial Sequence
  Description of Artificial Sequence: Synthetic peptide
KAIEAQQQLL

SEQ ID NO: 2470 - protein, 9 aa, Artificial Sequence
  Description of Artificial Sequence: Synthetic peptide
AIIRYLQQL

SEQ ID NO: 2471 - protein, 10 aa, Artificial Sequence
  Description of Artificial Sequence: Synthetic peptide
RQIDSISERV

SEQ ID NO: 2472 - protein, 9 aa, Artificial Sequence
  Description of Artificial Sequence: Synthetic peptide
VQINSTDNV

SEQ ID NO: 2473 - protein, 9 aa, Artificial Sequence
  Description of Artificial Sequence: Synthetic peptide
TVAEGTDRV

SEQ ID NO: 2474 - protein, 9 aa, Artificial Sequence
  Description of Artificial Sequence: Synthetic peptide
IVIAIISVV

SEQ ID NO: 2475 - protein, 9 aa, Artificial Sequence
  Description of Artificial Sequence: Synthetic peptide
QIIRQLHSA

SEQ ID NO: 2476 - protein, 9 aa, Artificial Sequence
  Description of Artificial Sequence: Synthetic peptide
IAARIVELV

SEQ ID NO: 2477 - protein, 9 aa, Artificial Sequence
  Description of Artificial Sequence: Synthetic peptide
KIIVVAVHV

SEQ ID NO: 2478 - protein, 9 aa, Artificial Sequence
  Description of Artificial Sequence: Synthetic peptide
QIYAGIKVK

SEQ ID NO: 2479 - protein, 9 aa, Artificial Sequence
  Description of Artificial Sequence: Synthetic peptide
QIYAGIQVK

SEQ ID NO: 2480 - protein, 10 aa, Artificial Sequence
  Description of Artificial Sequence: Synthetic peptide
IVQQQSNLLK

SEQ ID NO: 2481 - protein, 9 aa, Artificial Sequence
  Description of Artificial Sequence: Synthetic peptide
AIFQSSMTK

SEQ ID NO: 2482 - protein, 9 aa, Artificial Sequence
  Description of Artificial Sequence: Synthetic peptide
KVAEQLREK

SEQ ID NO: 2483 - protein, 9 aa, Artificial Sequence
  Description of Artificial Sequence: Synthetic peptide
ILGELVSPK

SEQ ID NO: 2484 - protein, 9 aa, Artificial Sequence
  Description of Artificial Sequence: Synthetic peptide
KILEPFRTK

SEQ ID NO: 2485 - protein, 9 aa, Artificial Sequence
  Description of Artificial Sequence: Synthetic peptide
KILEPFRSK

SEQ ID NO: 2486 - protein, 10 aa, Artificial Sequence
  Description of Artificial Sequence: Synthetic peptide
STNQNVMMQR

SEQ ID NO: 2487 - protein, 9 aa, Artificial Sequence
  Description of Artificial Sequence: Synthetic peptide
STWENGTNK

SEQ ID NO: 2488 - protein, 9 aa, Artificial Sequence
  Description of Artificial Sequence: Synthetic peptide
ALVASTRTK

SEQ ID NO: 2489 - protein, 9 aa, Artificial Sequence
  Description of Artificial Sequence: Synthetic peptide
AVVASTRTK

SEQ ID NO: 2490 - protein, 10 aa, Artificial Sequence
  Description of Artificial Sequence: Synthetic peptide
TVYYGVPVWK

SEQ ID NO: 2491 - protein, 11 aa, Artificial Sequence
  Description of Artificial Sequence: Synthetic peptide
TVNDIQKLVGK

SEQ ID NO: 2492 - protein, 10 aa, Artificial Sequence
  Description of Artificial Sequence: Synthetic peptide
AILGELVSPK

SEQ ID NO: 2493 - protein, 9 aa, Artificial Sequence
  Description of Artificial Sequence: Synthetic peptide
GLFNSTWTK

SEQ ID NO: 2494 - protein, 9 aa, Artificial Sequence
  Description of Artificial Sequence: Synthetic peptide
RVRDGASRP

SEQ ID NO: 2495 - protein, 11 aa, Artificial Sequence
  Description of Artificial Sequence: Synthetic peptide
RTKPPLPSVRK

SEQ ID NO: 2496 - protein, 10 aa, Artificial Sequence
  Description of Artificial Sequence: Synthetic peptide
STNTNIMMQR

SEQ ID NO: 2497 - protein, 10 aa, Artificial Sequence
  Description of Artificial Sequence: Synthetic peptide
SLFGNDPLSQ

SEQ ID NO: 2498 - protein, 10 aa, Artificial Sequence
  Description of Artificial Sequence: Synthetic peptide
ALTDIVTLTK

SEQ ID NO: 2499 - protein, 9 aa, Artificial Sequence
  Description of Artificial Sequence: Synthetic peptide
AVLYYVHQK

SEQ ID NO: 2500 - protein, 9 aa, Artificial Sequence
  Description of Artificial Sequence: Synthetic peptide
TLWNDTLQK

SEQ ID NO: 2501 - protein, 9 aa, Artificial Sequence
  Description of Artificial Sequence: Synthetic peptide
SVITQACPK

SEQ ID NO: 2502 - protein, 10 aa, Artificial Sequence
  Description of Artificial Sequence: Synthetic peptide
IVQQQSNLLK

SEQ ID NO: 2503 - protein, 11 aa, Artificial Sequence
  Description of Artificial Sequence: Synthetic peptide
TVNDIQKLVGK

SEQ ID NO: 2504 - protein, 9 aa, Artificial Sequence
  Description of Artificial Sequence: Synthetic peptide
QIYAGIQVK

SEQ ID NO: 2505 - protein, 10 aa, Artificial Sequence
  Description of Artificial Sequence: Synthetic peptide
TVQPIKLPEK

SEQ ID NO: 2506 - protein, 11 aa, Artificial Sequence
  Description of Artificial Sequence: Synthetic peptide
KIEPLGIAPTK

SEQ ID NO: 2507 - protein, 9 aa, Artificial Sequence
  Description of Artificial Sequence: Synthetic peptide
AIFQSSMTK

SEQ ID NO: 2508 - protein, 9 aa, Artificial Sequence
  Description of Artificial Sequence: Synthetic peptide
ILGELVSPK

SEQ ID NO: 2509 - protein, 10 aa, Artificial Sequence
  Description of Artificial Sequence: Synthetic peptide
AILGELVSPK

SEQ ID NO: 2510 - protein, 10 aa, Artificial Sequence
  Description of Artificial Sequence: Synthetic peptide
STNQNVMMQR

SEQ ID NO: 2511 - protein, 10 aa, Artificial Sequence
  Description of Artificial Sequence: Synthetic peptide
ALQTGTEELK

SEQ ID NO: 2512 - protein, 9 aa, Artificial Sequence
  Description of Artificial Sequence: Synthetic peptide
AVDLSHFLK

SEQ ID NO: 2513 - protein, 9 aa, Artificial Sequence
  Description of Artificial Sequence: Synthetic peptide
QIYAGIKVK

SEQ ID NO: 2514 - protein, 11 aa, Artificial Sequence
  Description of Artificial Sequence: Synthetic peptide
QVQNTNIMIQR

SEQ ID NO: 2515 - protein, 10 aa, Artificial Sequence
  Description of Artificial Sequence: Synthetic peptide
STNTNIMMQR

SEQ ID NO: 2516 - protein, 11 aa, Artificial Sequence
  Description of Artificial Sequence: Synthetic peptide
IVSLTETTNQK

SEQ ID NO: 2517 - protein, 9 aa, Artificial Sequence
  Description of Artificial Sequence: Synthetic peptide
SVITQACPK

SEQ ID NO: 2518 - protein, 9 aa, Artificial Sequence
  Description of Artificial Sequence: Synthetic peptide
AVLYYVHQK

SEQ ID NO: 2519 - protein, 9 aa, Artificial Sequence
  Description of Artificial Sequence: Synthetic peptide
APAGFAILK

SEQ ID NO: 2520 - protein, 11 aa, Artificial Sequence
  Description of Artificial Sequence: Synthetic peptide
ASQIYAGIQVK

SEQ ID NO: 2521 - protein, 10 aa, Artificial Sequence
  Description of Artificial Sequence: Synthetic peptide
SITEWNATLK

SEQ ID NO: 2522 - protein, 9 aa, Artificial Sequence
  Description of Artificial Sequence: Synthetic peptide
STWENGTNK

SEQ ID NO: 2523 - protein, 11 aa, Artificial Sequence
  Description of Artificial Sequence: Synthetic peptide
QSQGVVESMNK

SEQ ID NO: 2524 - protein, 10 aa, Artificial Sequence
  Description of Artificial Sequence: Synthetic peptide
GLDGLIYSQK

SEQ ID NO: 2525 - protein, 10 aa, Artificial Sequence
  Description of Artificial Sequence: Synthetic peptide
RVPTGPEEPK

SEQ ID NO: 2526 - protein, 9 aa, Artificial Sequence
  Description of Artificial Sequence: Synthetic peptide
QSNPYPTPR

SEQ ID NO: 2527 - protein, 9 aa, Artificial Sequence
  Description of Artificial Sequence: Synthetic peptide
IIATDIQTK

SEQ ID NO: 2528 - protein, 9 aa, Artificial Sequence
  Description of Artificial Sequence: Synthetic peptide
STITQACPK

SEQ ID NO: 2529 - protein, 10 aa, Artificial Sequence
  Description of Artificial Sequence: Synthetic peptide
ALTDIVTLTK

SEQ ID NO: 2530 - protein, 9 aa, Artificial Sequence
  Description of Artificial Sequence: Synthetic peptide
KVAEQLREK

SEQ ID NO: 2531 - protein, 9 aa, Artificial Sequence
  Description of Artificial Sequence: Synthetic peptide
GLFNSTWTK

SEQ ID NO: 2532 - protein, 11 aa, Artificial Sequence
  Description of Artificial Sequence: Synthetic peptide
SALPVGTEELK

SEQ ID NO: 2533 - protein, 10 aa, Artificial Sequence
  Description of Artificial Sequence: Synthetic peptide
ATESIVIWGK

SEQ ID NO: 2534 - protein, 9 aa, Artificial Sequence
  Description of Artificial Sequence: Synthetic peptide
VIAIISVVK

SEQ ID NO: 2535 - protein, 9 aa, Artificial Sequence
  Description of Artificial Sequence: Synthetic peptide
KQLTEAVQK

SEQ ID NO: 2536 - protein, 11 aa, Artificial Sequence
  Description of Artificial Sequence: Synthetic peptide
ATDIQTKELQK

SEQ ID NO: 2537 - protein, 10 aa, Artificial Sequence
  Description of Artificial Sequence: Synthetic peptide
SILDIKQGPK

SEQ ID NO: 2538 - protein, 9 aa, Artificial Sequence
  Description of Artificial Sequence: Synthetic peptide
VQQQSNLLK

SEQ ID NO: 2539 - protein, 10 aa, Artificial Sequence
  Description of Artificial Sequence: Synthetic peptide
VVQLDESENK

SEQ ID NO: 2540 - protein, 11 aa, Artificial Sequence
  Description of Artificial Sequence: Synthetic peptide
IVPLTETTNQK

SEQ ID NO: 2541 - protein, 10 aa, Artificial Sequence
  Description of Artificial Sequence: Synthetic peptide
VVESMNKELK

SEQ ID NO: 2542 - protein, 10 aa, Artificial Sequence
  Description of Artificial Sequence: Synthetic peptide
STNQNVMMQR

SEQ ID NO: 2543 - protein, 10 aa, Artificial Sequence
  Description of Artificial Sequence: Synthetic peptide
IVQQQSNLLK

SEQ ID NO: 2544 - protein, 9 aa, Artificial Sequence
  Description of Artificial Sequence: Synthetic peptide
SVITQACPK

SEQ ID NO: 2545 - protein, 9 aa, Artificial Sequence
  Description of Artificial Sequence: Synthetic peptide
STITQACPK

SEQ ID NO: 2546 - protein, 9 aa, Artificial Sequence
  Description of Artificial Sequence: Synthetic peptide
STWENGTNK

SEQ ID NO: 2547 - protein, 10 aa, Artificial Sequence
  Description of Artificial Sequence: Synthetic peptide
STNTNIMMQR

SEQ ID NO: 2548 - protein, 9 aa, Artificial Sequence
  Description of Artificial Sequence: Synthetic peptide
QIYAGIQVK

SEQ ID NO: 2549 - protein, 11 aa, Artificial Sequence
  Description of Artificial Sequence: Synthetic peptide
TVNDIQKLVGK

SEQ ID NO: 2550 - protein, 9 aa, Artificial Sequence
  Description of Artificial Sequence: Synthetic peptide
QIYAGIKVK

SEQ ID NO: 2551 - protein, 9 aa, Artificial Sequence
  Description of Artificial Sequence: Synthetic peptide
APAGFAILK

SEQ ID NO: 2552 - protein, 9 aa, Artificial Sequence
  Description of Artificial Sequence: Synthetic peptide
AVLYYVHQK

SEQ ID NO: 2553 - protein, 9 aa, Artificial Sequence
  Description of Artificial Sequence: Synthetic peptide
AVDLSHFLK

SEQ ID NO: 2554 - protein, 11 aa, Artificial Sequence
  Description of Artificial Sequence: Synthetic peptide
QVQNTNIMIQR

SEQ ID NO: 2555 - protein, 10 aa, Artificial Sequence
  Description of Artificial Sequence: Synthetic peptide
RVPTGPEEPK

SEQ ID NO: 2556 - protein, 10 aa, Artificial Sequence
  Description of Artificial Sequence: Synthetic peptide
TVQPIKLPEK

SEQ ID NO: 2557 - protein, 11 aa, Artificial Sequence
  Description of Artificial Sequence: Synthetic peptide
ATQGENNSLLH

SEQ ID NO: 2558 - protein, 9 aa, Artificial Sequence
  Description of Artificial Sequence: Synthetic peptide
APAGYAILK

SEQ ID NO: 2559 - protein, 11 aa, Artificial Sequence
  Description of Artificial Sequence: Synthetic peptide
ATDIQTKELQK

SEQ ID NO: 2560 - protein, 9 aa, Artificial Sequence
  Description of Artificial Sequence: Synthetic peptide
AVLYFVHQK

SEQ ID NO: 2561 - protein, 9 aa, Artificial Sequence
  Description of Artificial Sequence: Synthetic peptide
AIFQSSMTK

SEQ ID NO: 2562 - protein, 9 aa, Artificial Sequence
  Description of Artificial Sequence: Synthetic peptide
GSLQYLALK

SEQ ID NO: 2563 - protein, 9 aa, Artificial Sequence
  Description of Artificial Sequence: Synthetic peptide
AVVASTRTK

SEQ ID NO: 2564 - protein, 10 aa, Artificial Sequence
  Description of Artificial Sequence: Synthetic peptide
ATESIVIWGK

SEQ ID NO: 2565 - protein, 9 aa, Artificial Sequence
  Description of Artificial Sequence: Synthetic peptide
QSNPYPTPR

SEQ ID NO: 2566 - protein, 9 aa, Artificial Sequence
  Description of Artificial Sequence: Synthetic peptide
QIIEKLIEK

SEQ ID NO: 2567 - protein, 9 aa, Artificial Sequence
  Description of Artificial Sequence: Synthetic peptide
VQQQSNLLK

SEQ ID NO: 2568 - protein, 10 aa, Artificial Sequence
  Description of Artificial Sequence: Synthetic peptide
GAVDLSHFLK

SEQ ID NO: 2569 - protein, 8 aa, Artificial Sequence
  Description of Artificial Sequence: Synthetic peptide
PAGYAILK

SEQ ID NO: 2570 - protein, 10 aa, Artificial Sequence
  Description of Artificial Sequence: Synthetic peptide
SITEWNATLK

SEQ ID NO: 2571 - protein, 9 aa, Artificial Sequence
  Description of Artificial Sequence: Synthetic peptide
KVAEQLREK

SEQ ID NO: 2572 - protein, 11 aa, Artificial Sequence
  Description of Artificial Sequence: Synthetic peptide
IVPLTETTNQK

SEQ ID NO: 2573 - protein, 9 aa, Artificial Sequence
  Description of Artificial Sequence: Synthetic peptide
LTDIVTLTK

SEQ ID NO: 2574 - protein, 9 aa, Artificial Sequence
  Description of Artificial Sequence: Synthetic peptide
SSEVHIPLK

SEQ ID NO: 2575 - protein, 11 aa, Artificial Sequence
  Description of Artificial Sequence: Synthetic peptide
GVVESMNKELK

SEQ ID NO: 2576 - protein, 10 aa, Artificial Sequence
  Description of Artificial Sequence: Synthetic peptide
AILGELVSPK

SEQ ID NO: 2577 - protein, 10 aa, Artificial Sequence
  Description of Artificial Sequence: Synthetic peptide
GAFDLSHFLK

SEQ ID NO: 2578 - protein, 9 aa, Artificial Sequence
  Description of Artificial Sequence: Synthetic peptide
ITEWNATLK

SEQ ID NO: 2579 - protein, 10 aa, Artificial Sequence
  Description of Artificial Sequence: Synthetic peptide
SILDIKQGPK

SEQ ID NO: 2580 - protein, 9 aa, Artificial Sequence
  Description of Artificial Sequence: Synthetic peptide
SNYTETIYK

SEQ ID NO: 2581 - protein, 8 aa, Artificial Sequence
  Description of Artificial Sequence: Synthetic peptide
TDIVPLTR

SEQ ID NO: 2582 - protein, 8 aa, Artificial Sequence
  Description of Artificial Sequence: Synthetic peptide
TDIVTLTK

SEQ ID NO: 2583 - protein, 9 aa, Artificial Sequence
  Description of Artificial Sequence: Synthetic peptide
GQAFYTNNK

SEQ ID NO: 2584 - protein, 9 aa, Artificial Sequence
  Description of Artificial Sequence: Synthetic peptide
NYTNIIYRL

SEQ ID NO: 2585 - protein, 9 aa, Artificial Sequence
  Description of Artificial Sequence: Synthetic peptide
NYTETIYKL

SEQ ID NO: 2586 - protein, 9 aa, Artificial Sequence
  Description of Artificial Sequence: Synthetic peptide
TYTDIIYML

SEQ ID NO: 2587 - protein, 9 aa, Artificial Sequence
  Description of Artificial Sequence: Synthetic peptide
RYLQDQQLL

SEQ ID NO: 2588 - protein, 11 aa, Artificial Sequence
  Description of Artificial Sequence: Synthetic peptide
RYLQQLLFVHF

SEQ ID NO: 2589 - protein, 9 aa, Artificial Sequence
  Description of Artificial Sequence: Synthetic peptide
IYQEPFKNL

SEQ ID NO: 2590 - protein, 9 aa, Artificial Sequence
  Description of Artificial Sequence: Synthetic peptide
RYLKDQQLL

SEQ ID NO: 2591 - protein, 8 aa, Artificial Sequence
  Description of Artificial Sequence: Synthetic peptide
TELIIYQY

SEQ ID NO: 2592 - protein, 9 aa, Artificial Sequence
  Description of Artificial Sequence: Synthetic peptide
GYSPVSFQI

SEQ ID NO: 2593 - protein, 9 aa, Artificial Sequence
  Description of Artificial Sequence: Synthetic peptide
FYKLDIVQI

SEQ ID NO: 2594 - protein, 9 aa, Artificial Sequence
  Description of Artificial Sequence: Synthetic peptide
NYTETIYKL

SEQ ID NO: 2595 - protein, 9 aa, Artificial Sequence
  Description of Artificial Sequence: Synthetic peptide
NYTNIIYRL

SEQ ID NO: 2596 - protein, 9 aa, Artificial Sequence
  Description of Artificial Sequence: Synthetic peptide
TYTDIIYML

SEQ ID NO: 2597 - protein, 9 aa, Artificial Sequence
  Description of Artificial Sequence: Synthetic peptide
RYLQDQQLL

SEQ ID NO: 2598 - protein, 9 aa, Artificial Sequence
  Description of Artificial Sequence: Synthetic peptide
FYKLDIVQI

SEQ ID NO: 2599 - protein, 9 aa, Artificial Sequence
  Description of Artificial Sequence: Synthetic peptide
IYQEPFKNL

SEQ ID NO: 2600 - protein, 9 aa, Artificial Sequence
  Description of Artificial Sequence: Synthetic peptide
RYLKDQQLL

SEQ ID NO: 2601 - protein, 9 aa, Artificial Sequence
  Description of Artificial Sequence: Synthetic peptide
IYNTYGDTW

SEQ ID NO: 2602 - protein, 9 aa, Artificial Sequence
  Description of Artificial Sequence: Synthetic peptide
FYELDVVLL

SEQ ID NO: 2603 - protein, 9 aa, Artificial Sequence
  Description of Artificial Sequence: Synthetic peptide
GYSPVSFQI

SEQ ID NO: 2604 - protein, 9 aa, Artificial Sequence
  Description of Artificial Sequence: Synthetic peptide
QYDQIVIEI

SEQ ID NO: 2605 - protein, 9 aa, Artificial Sequence
  Description of Artificial Sequence: Synthetic peptide
YYDPSKDLI

SEQ ID NO: 2606 - protein, 10 aa, Artificial Sequence
  Description of Artificial Sequence: Synthetic peptide
DTIAVAVAEW

SEQ ID NO: 2607 - protein, 10 aa, Artificial Sequence
  Description of Artificial Sequence: Synthetic peptide
DTINEEAAEW

SEQ ID NO: 2608 - protein, 9 aa, Artificial Sequence
  Description of Artificial Sequence: Synthetic peptide
EVIPMFSAL

SEQ ID NO: 2609 - protein, 10 aa, Artificial Sequence
  Description of Artificial Sequence: Synthetic peptide
AVSPRTLNAW

SEQ ID NO: 2610 - protein, 9 aa, Artificial Sequence
  Description of Artificial Sequence: Synthetic peptide
EVIPMFTAL

SEQ ID NO: 2611 - protein, 10 aa, Artificial Sequence
  Description of Artificial Sequence: Synthetic peptide
EIQKQGQGQW

SEQ ID NO: 2612 - protein, 9 aa, Artificial Sequence
  Description of Artificial Sequence: Synthetic peptide
TIAVAVAEW

SEQ ID NO: 2613 - protein, 9 aa, Artificial Sequence
  Description of Artificial Sequence: Synthetic peptide
WTKEGNSTW

SEQ ID NO: 2614 - protein, 9 aa, Artificial Sequence
  Description of Artificial Sequence: Synthetic peptide
DIAGTTSTL

SEQ ID NO: 2615 - protein, 9 aa, Artificial Sequence
  Description of Artificial Sequence: Synthetic peptide
TTVPWNTSW

SEQ ID NO: 2616 - protein, 9 aa, Artificial Sequence
  Description of Artificial Sequence: Synthetic peptide
TTVPWNSSW

SEQ ID NO: 2617 - protein, 9 aa, Artificial Sequence
  Description of Artificial Sequence: Synthetic peptide
NVTENFNMW

SEQ ID NO: 2618 - protein, 10 aa, Artificial Sequence
  Description of Artificial Sequence: Synthetic peptide
EVKDNTTKEM

SEQ ID NO: 2619 - protein, 10 aa, Artificial Sequence
  Description of Artificial Sequence: Synthetic peptide
NTTGLFNSTW

SEQ ID NO: 2620 - protein, 9 aa, Artificial Sequence
  Description of Artificial Sequence: Synthetic peptide
ETTNQRTEL

SEQ ID NO: 2621 - protein, 9 aa, Artificial Sequence
  Description of Artificial Sequence: Synthetic peptide
EIIGDIRQA

SEQ ID NO: 2622 - protein, 10 aa, Artificial Sequence
  Description of Artificial Sequence: Synthetic peptide
EVNIVTDSQY

SEQ ID NO: 2623 - protein, 10 aa, Artificial Sequence
  Description of Artificial Sequence: Synthetic peptide
EVNIVTDSQY

SEQ ID NO: 2624 - protein, 9 aa, Artificial Sequence
  Description of Artificial Sequence: Synthetic peptide
EVIPMFSAL

SEQ ID NO: 2625 - protein, 9 aa, Artificial Sequence
  Description of Artificial Sequence: Synthetic peptide
EIIGDIRQA

SEQ ID NO: 2626 - protein, 11 aa, Artificial Sequence
  Description of Artificial Sequence: Synthetic peptide
ETGTEELRSLY

SEQ ID NO: 2627 - protein, 9 aa, Artificial Sequence
  Description of Artificial Sequence: Synthetic peptide
EVIPMFTAL

SEQ ID NO: 2628 - protein, 9 aa, Artificial Sequence
  Description of Artificial Sequence: Synthetic peptide
ETKLGKAGY

SEQ ID NO: 2629 - protein, 9 aa, Artificial Sequence
  Description of Artificial Sequence: Synthetic peptide
ETPGIRYQY

SEQ ID NO: 2630 - protein, 9 aa, Artificial Sequence
  Description of Artificial Sequence: Synthetic peptide
EIVSPRCEY

SEQ ID NO: 2631 - protein, 10 aa, Artificial Sequence
  Description of Artificial Sequence: Synthetic peptide
DTIAVAVAEW

SEQ ID NO: 2632 - protein, 9 aa, Artificial Sequence
  Description of Artificial Sequence: Synthetic peptide
ETPGVRYQY

SEQ ID NO: 2633 - protein, 9 aa, Artificial Sequence
  Description of Artificial Sequence: Synthetic peptide
EVIPTETGQ

SEQ ID NO: 2634 - protein, 10 aa, Artificial Sequence
  Description of Artificial Sequence: Synthetic peptide
EVIPAETGQE

SEQ ID NO: 2635 - protein, 10 aa, Artificial Sequence
  Description of Artificial Sequence: Synthetic peptide
DVKQEFGIPY

SEQ ID NO: 2636 - protein, 10 aa, Artificial Sequence
  Description of Artificial Sequence: Synthetic peptide
ETFRPGGGDM

SEQ ID NO: 2637 - protein, 9 aa, Artificial Sequence
  Description of Artificial Sequence: Synthetic peptide
EVIPAETGQ

SEQ ID NO: 2638 - protein, 9 aa, Artificial Sequence
  Description of Artificial Sequence: Synthetic peptide
NTSGSNTLY

SEQ ID NO: 2639 - protein, 9 aa, Artificial Sequence
  Description of Artificial Sequence: Synthetic peptide
ELVSPKCEY

SEQ ID NO: 2640 - protein, 10 aa, Artificial Sequence
  Description of Artificial Sequence: Synthetic peptide
EVKDNTTKEM

SEQ ID NO: 2641 - protein, 9 aa, Artificial Sequence
  Description of Artificial Sequence: Synthetic peptide
EVIPMFSAL

SEQ ID NO: 2642 - protein, 9 aa, Artificial Sequence
  Description of Artificial Sequence: Synthetic peptide
EVIPMFTAL

SEQ ID NO: 2643 - protein, 10 aa, Artificial Sequence
  Description of Artificial Sequence: Synthetic peptide
EVNIVTDSQY

SEQ ID NO: 2644 - protein, 9 aa, Artificial Sequence
  Description of Artificial Sequence: Synthetic peptide
DIAGATSNL

SEQ ID NO: 2645 - protein, 9 aa, Artificial Sequence
  Description of Artificial Sequence: Synthetic peptide
DIAGTTSTL

SEQ ID NO: 2646 - protein, 10 aa, Artificial Sequence
  Description of Artificial Sequence: Synthetic peptide
DTIAVAVAEW

SEQ ID NO: 2647 - protein, 10 aa, Artificial Sequence
  Description of Artificial Sequence: Synthetic peptide
EIVNQIIEKL

SEQ ID NO: 2648 - protein, 9 aa, Artificial Sequence
  Description of Artificial Sequence: Synthetic peptide
SIVGLIVAF

SEQ ID NO: 2649 - protein, 9 aa, Artificial Sequence
  Description of Artificial Sequence: Synthetic peptide
EIIGDIRQA

SEQ ID NO: 2650 - protein, 10 aa, Artificial Sequence
  Description of Artificial Sequence: Synthetic peptide
EVKDNTTKEM

SEQ ID NO: 2651 - protein, 9 aa, Artificial Sequence
  Description of Artificial Sequence: Synthetic peptide
NAKNIIVQF

SEQ ID NO: 2652 - protein, 9 aa, Artificial Sequence
  Description of Artificial Sequence: Synthetic peptide
DLKNVTENF

SEQ ID NO: 2653 - protein, 9 aa, Artificial Sequence
  Description of Artificial Sequence: Synthetic peptide
EVIPMFTAL

SEQ ID NO: 2654 - protein, 9 aa, Artificial Sequence
  Description of Artificial Sequence: Synthetic peptide
EVIPMFSAL

SEQ ID NO: 2655 - protein, 9 aa, Artificial Sequence
  Description of Artificial Sequence: Synthetic peptide
EIIGDIRQA

SEQ ID NO: 2656 - protein, 9 aa, Artificial Sequence
  Description of Artificial Sequence: Synthetic peptide
DIAGATSNL

SEQ ID NO: 2657 - protein, 9 aa, Artificial Sequence
  Description of Artificial Sequence: Synthetic peptide
MVHQAVSPR

SEQ ID NO: 2658 - protein, 10 aa, Artificial Sequence
  Description of Artificial Sequence: Synthetic peptide
DTIAVAVAEW

SEQ ID NO: 2659 - protein, 9 aa, Artificial Sequence
  Description of Artificial Sequence: Synthetic peptide
NITGIILTR

SEQ ID NO: 2660 - protein, 10 aa, Artificial Sequence
  Description of Artificial Sequence: Synthetic peptide
EVKDNTTKEM

SEQ ID NO: 2661 - protein, 9 aa, Artificial Sequence
  Description of Artificial Sequence: Synthetic peptide
MVHQAISPR

SEQ ID NO: 2662 - protein, 9 aa, Artificial Sequence
  Description of Artificial Sequence: Synthetic peptide
EIVNQIIEK

SEQ ID NO: 2663 - protein, 10 aa, Artificial Sequence
  Description of Artificial Sequence: Synthetic peptide
STNTNIMMQR

SEQ ID NO: 2664 - protein, 9 aa, Artificial Sequence
  Description of Artificial Sequence: Synthetic peptide
DIAGTTSTL

SEQ ID NO: 2665 - protein, 10 aa, Artificial Sequence
  Description of Artificial Sequence: Synthetic peptide
AIIGEIVSPR

SEQ ID NO: 2666 - protein, 9 aa, Artificial Sequence
  Description of Artificial Sequence: Synthetic peptide
ELVGHSSLK

SEQ ID NO: 2667 - protein, 10 aa, Artificial Sequence
  Description of Artificial Sequence: Synthetic peptide
DNSDIKVVPR

SEQ ID NO: 2668 - protein, 10 aa, Artificial Sequence
  Description of Artificial Sequence: Synthetic peptide
STNQNVMMQR

SEQ ID NO: 2669 - protein, 9 aa, Artificial Sequence
  Description of Artificial Sequence: Synthetic peptide
QNTNIMIQR

SEQ ID NO: 2670 - protein, 9 aa, Artificial Sequence
  Description of Artificial Sequence: Synthetic peptide
EVIPTETGQ

SEQ ID NO: 2671 - protein, 9 aa, Artificial Sequence
  Description of Artificial Sequence: Synthetic peptide
DSISERVLR

SEQ ID NO: 2672 - protein, 9 aa, Artificial Sequence
  Description of Artificial Sequence: Synthetic peptide
TVLDVGDAY

SEQ ID NO: 2673 - protein, 9 aa, Artificial Sequence
  Description of Artificial Sequence: Synthetic peptide
NTELIIYQY

SEQ ID NO: 2674 - protein, 10 aa, Artificial Sequence
  Description of Artificial Sequence: Synthetic peptide
VTFEPIPIHY

SEQ ID NO: 2675 - protein, 9 aa, Artificial Sequence
  Description of Artificial Sequence: Synthetic peptide
LYNTIAVLY

SEQ ID NO: 2676 - protein, 9 aa, Artificial Sequence
  Description of Artificial Sequence: Synthetic peptide
SFEPIPIHY

SEQ ID NO: 2677 - protein, 9 aa, Artificial Sequence
  Description of Artificial Sequence: Synthetic peptide
TFEPIPIHY

SEQ ID NO: 2678 - protein, 9 aa, Artificial Sequence
  Description of Artificial Sequence: Synthetic peptide
LYNTVVVLY

SEQ ID NO: 2679 - protein, 10 aa, Artificial Sequence
  Description of Artificial Sequence: Synthetic peptide
FLNKGLGISY

SEQ ID NO: 2680 - protein, 9 aa, Artificial Sequence
  Description of Artificial Sequence: Synthetic peptide
GYFPDWQNY

SEQ ID NO: 2681 - protein, 9 aa, Artificial Sequence
  Description of Artificial Sequence: Synthetic peptide
SFEPIPIHY

SEQ ID NO: 2682 - protein, 10 aa, Artificial Sequence
  Description of Artificial Sequence: Synthetic peptide
VTFEPIPIHY

SEQ ID NO: 2683 - protein, 9 aa, Artificial Sequence
  Description of Artificial Sequence: Synthetic peptide
LYNTIAVLY

SEQ ID NO: 2684 - protein, 9 aa, Artificial Sequence
  Description of Artificial Sequence: Synthetic peptide
TFEPIPIHY

SEQ ID NO: 2685 - protein, 9 aa, Artificial Sequence
  Description of Artificial Sequence: Synthetic peptide
VWTIVFIEY

SEQ ID NO: 2686 - protein, 9 aa, Artificial Sequence
  Description of Artificial Sequence: Synthetic peptide
VWTIVFIQY

SEQ ID NO: 2687 - protein, 9 aa, Artificial Sequence
  Description of Artificial Sequence: Synthetic peptide
LYNTVVVLY

SEQ ID NO: 2688 - protein, 9 aa, Artificial Sequence
  Description of Artificial Sequence: Synthetic peptide
INKGLGISY

SEQ ID NO: 2689 - protein, 10 aa, Artificial Sequence
  Description of Artificial Sequence: Synthetic peptide
YFSVPLHEDF

SEQ ID NO: 2690 - protein, 9 aa, Artificial Sequence
  Description of Artificial Sequence: Synthetic peptide
VWTVVFIEY

SEQ ID NO: 2691 - protein, 9 aa, Artificial Sequence
  Description of Artificial Sequence: Synthetic peptide
NTELIIYQY

SEQ ID NO: 2692 - protein, 10 aa, Artificial Sequence
  Description of Artificial Sequence: Synthetic peptide
VVWTIVFIQY

SEQ ID NO: 2693 - protein, 10 aa, Artificial Sequence
  Description of Artificial Sequence: Synthetic peptide
SLFGNDPLLQ

SEQ ID NO: 2694 - protein, 9 aa, Artificial Sequence
  Description of Artificial Sequence: Synthetic peptide
TNLWVTVYY

SEQ ID NO: 2695 - protein, 9 aa, Artificial Sequence
  Description of Artificial Sequence: Synthetic peptide
LNKGLGISY

SEQ ID NO: 2696 - protein, 9 aa, Artificial Sequence
  Description of Artificial Sequence: Synthetic peptide
TVLDVGDAY

SEQ ID NO: 2697 - protein, 9 aa, Artificial Sequence
  Description of Artificial Sequence: Synthetic peptide
RFGPGQAFY

SEQ ID NO: 2698 - protein, 9 aa, Artificial Sequence
  Description of Artificial Sequence: Synthetic peptide
YNTIAVLYY

SEQ ID NO: 2699 - protein, 9 aa, Artificial Sequence
  Description of Artificial Sequence: Synthetic peptide
RTKPPLPSV

SEQ ID NO: 2700 - protein, 9 aa, Artificial Sequence
  Description of Artificial Sequence: Synthetic peptide
TEAVQKITM

SEQ ID NO: 2701 - protein, 9 aa, Artificial Sequence
  Description of Artificial Sequence: Synthetic peptide
GVRPTPPAA

SEQ ID NO: 2702 - protein, 9 aa, Artificial Sequence
  Description of Artificial Sequence: Synthetic peptide
TESNDTITL

SEQ ID NO: 2703 - protein, 9 aa, Artificial Sequence
  Description of Artificial Sequence: Synthetic peptide
VELVGHSSL

SEQ ID NO: 2704 - protein, 9 aa, Artificial Sequence
  Description of Artificial Sequence: Synthetic peptide
EQHTPTISL

SEQ ID NO: 2705 - protein, 11 aa, Artificial Sequence
  Description of Artificial Sequence: Synthetic peptide
SERESNDNITL

SEQ ID NO: 2706 - protein, 9 aa, Artificial Sequence
  Description of Artificial Sequence: Synthetic peptide
TEAVQKIVM

SEQ ID NO: 2707 - protein, 11 aa, Artificial Sequence
  Description of Artificial Sequence: Synthetic peptide
EEIASSSKQEL

SEQ ID NO: 2708 - protein, 11 aa, Artificial Sequence
  Description of Artificial Sequence: Synthetic peptide
GTEKQGTTHSY

SEQ ID NO: 2709 - protein, 9 aa, Artificial Sequence
  Description of Artificial Sequence: Synthetic peptide
RVMGTQRNY

SEQ ID NO: 2710 - protein, 9 aa, Artificial Sequence
  Description of Artificial Sequence: Synthetic peptide
GTEELRSLY

SEQ ID NO: 2711 - protein, 9 aa, Artificial Sequence
  Description of Artificial Sequence: Synthetic peptide
TVLDVGDAY

SEQ ID NO: 2712 - protein, 10 aa, Artificial Sequence
  Description of Artificial Sequence: Synthetic peptide
ILKDPVHGVY

SEQ ID NO: 2713 - protein, 9 aa, Artificial Sequence
  Description of Artificial Sequence: Synthetic peptide
GTEELKSLY

SEQ ID NO: 2714 - protein, 11 aa, Artificial Sequence
  Description of Artificial Sequence: Synthetic peptide
QTGTEELKSLY

SEQ ID NO: 2715 - protein, 9 aa, Artificial Sequence
  Description of Artificial Sequence: Synthetic peptide
ATNLWVTVY

SEQ ID NO: 2716 - protein, 9 aa, Artificial Sequence
  Description of Artificial Sequence: Synthetic peptide
KAQEEHERY

SEQ ID NO: 2717 - protein, 8 aa, Artificial Sequence
  Description of Artificial Sequence: Synthetic peptide
KQGTTHSY

SEQ ID NO: 2718 - protein, 9 aa, Artificial Sequence
  Description of Artificial Sequence: Synthetic peptide
INKGLGISY

SEQ ID NO: 2719 - protein, 10 aa, Artificial Sequence
  Description of Artificial Sequence: Synthetic peptide
RSKNSSYSTY

SEQ ID NO: 2720 - protein, 10 aa, Artificial Sequence
  Description of Artificial Sequence: Synthetic peptide
ILKNPVHGVY

SEQ ID NO: 2721 - protein, 9 aa, Artificial Sequence
  Description of Artificial Sequence: Synthetic peptide
KAQEEHEKY

SEQ ID NO: 2722 - protein, 11 aa, Artificial Sequence
  Description of Artificial Sequence: Synthetic peptide
STNNETPGVRY

SEQ ID NO: 2723 - protein, 9 aa, Artificial Sequence
  Description of Artificial Sequence: Synthetic peptide
RVMGTQRNY

SEQ ID NO: 2724 - protein, 9 aa, Artificial Sequence
  Description of Artificial Sequence: Synthetic peptide
GTEELRSLY

SEQ ID NO: 2725 - protein, 9 aa, Artificial Sequence
  Description of Artificial Sequence: Synthetic peptide
ATNLWVTVY

SEQ ID NO: 2726 - protein, 10 aa, Artificial Sequence
  Description of Artificial Sequence: Synthetic peptide
FLNKGLGISY

SEQ ID NO: 2727 - protein, 11 aa, Artificial Sequence
  Description of Artificial Sequence: Synthetic peptide
GTEKQGTTHSY

SEQ ID NO: 2728 - protein, 9 aa, Artificial Sequence
  Description of Artificial Sequence: Synthetic peptide
VVNRVRQGY

SEQ ID NO: 2729 - protein, 11 aa, Artificial Sequence
  Description of Artificial Sequence: Synthetic peptide
QVQNTNIMIQR

SEQ ID NO: 2730 - protein, 10 aa, Artificial Sequence
  Description of Artificial Sequence: Synthetic peptide
RTKPPLPSVR

SEQ ID NO: 2731 - protein, 9 aa, Artificial Sequence
  Description of Artificial Sequence: Synthetic peptide
QSNPYPTPR

SEQ ID NO: 2732 - protein, 10 aa, Artificial Sequence
  Description of Artificial Sequence: Synthetic peptide
VQNTNIMIQR

SEQ ID NO: 2733 - protein, 9 aa, Artificial Sequence
  Description of Artificial Sequence: Synthetic peptide
SYNTTTILR

SEQ ID NO: 2734 - protein, 9 aa, Artificial Sequence
  Description of Artificial Sequence: Synthetic peptide
QSNPYPKPR

SEQ ID NO: 2735 - protein, 10 aa, Artificial Sequence
  Description of Artificial Sequence: Synthetic peptide
STNQNVMMQR

SEQ ID NO: 2736 - protein, 10 aa, Artificial Sequence
  Description of Artificial Sequence: Synthetic peptide
STNTNIMMQR

SEQ ID NO: 2737 - protein, 11 aa, Artificial Sequence
  Description of Artificial Sequence: Synthetic peptide
RSKNSSYSTYR

SEQ ID NO: 2738 - protein, 11 aa, Artificial Sequence
  Description of Artificial Sequence: Synthetic peptide
RVIEIGQRAFR

SEQ ID NO: 2739 - protein, 11 aa, Artificial Sequence
  Description of Artificial Sequence: Synthetic peptide
RQRQIDSISER

SEQ ID NO: 2740 - protein, 9 aa, Artificial Sequence
  Description of Artificial Sequence: Synthetic peptide
KGWPAVRER

SEQ ID NO: 2741 - protein, 9 aa, Artificial Sequence
  Description of Artificial Sequence: Synthetic peptide
GTRGAVTIR

SEQ ID NO: 2742 - protein, 9 aa, Artificial Sequence
  Description of Artificial Sequence: Synthetic peptide
TNQNVMMQR

SEQ ID NO: 2743 - protein, 9 aa, Artificial Sequence
  Description of Artificial Sequence: Synthetic peptide
RQIDSISER

SEQ ID NO: 2744 - protein, 9 aa, Artificial Sequence
  Description of Artificial Sequence: Synthetic peptide
VVLYWVHQR

SEQ ID NO: 2745 - protein, 9 aa, Artificial Sequence
  Description of Artificial Sequence: Synthetic peptide
KQIINMWQR

SEQ ID NO: 2746 - protein, 11 aa, Artificial Sequence
  Description of Artificial Sequence: Synthetic peptide
TVNDIQKLVGK

SEQ ID NO: 2747 - protein, 9 aa, Artificial Sequence
  Description of Artificial Sequence: Synthetic peptide
KGLGISYGR

SEQ ID NO: 2748 - protein, 9 aa, Artificial Sequence
  Description of Artificial Sequence: Synthetic peptide
SNYTNIIYR

SEQ ID NO: 2749 - protein, 9 aa, Artificial Sequence
  Description of Artificial Sequence: Synthetic peptide
TVKIEGQLR

SEQ ID NO: 2750 - protein, 8 aa, Artificial Sequence
  Description of Artificial Sequence: Synthetic peptide
NQNVMMQR

SEQ ID NO: 2751 - protein, 9 aa, Artificial Sequence
  Description of Artificial Sequence: Synthetic peptide
VYYGVPVWR

SEQ ID NO: 2752 - protein, 9 aa, Artificial Sequence
  Description of Artificial Sequence: Synthetic peptide
ILNIPTRIR

SEQ ID NO: 2753 - protein, 11 aa, Artificial Sequence
  Description of Artificial Sequence: Synthetic peptide
VGPTPVNIIGR

SEQ ID NO: 2754 - protein, 8 aa, Artificial Sequence
  Description of Artificial Sequence: Synthetic peptide
NTNIMMQR

SEQ ID NO: 2755 - protein, 10 aa, Artificial Sequence
  Description of Artificial Sequence: Synthetic peptide
ALKAVVASTR

SEQ ID NO: 2756 - protein, 9 aa, Artificial Sequence
  Description of Artificial Sequence: Synthetic peptide
QIYAGIKVR

SEQ ID NO: 2757 - protein, 11 aa, Artificial Sequence
  Description of Artificial Sequence: Synthetic peptide
RQRHISSISER

SEQ ID NO: 2758 - protein, 9 aa, Artificial Sequence
  Description of Artificial Sequence: Synthetic peptide
VVNRVRQGY

SEQ ID NO: 2759 - protein, 9 aa, Artificial Sequence
  Description of Artificial Sequence: Synthetic peptide
VINRVRQGY

SEQ ID NO: 2760 - protein, 10 aa, Artificial Sequence
  Description of Artificial Sequence: Synthetic peptide
SVINRVRQGY

SEQ ID NO: 2761 - protein, 9 aa, Artificial Sequence
  Description of Artificial Sequence: Synthetic peptide
RVMGTQRNY

SEQ ID NO: 2762 - protein, 11 aa, Artificial Sequence
  Description of Artificial Sequence: Synthetic peptide
DTREGVEAIVR

SEQ ID NO: 2763 - protein, 9 aa, Artificial Sequence
  Description of Artificial Sequence: Synthetic peptide
SYNTTTILR

SEQ ID NO: 2764 - protein, 11 aa, Artificial Sequence
  Description of Artificial Sequence: Synthetic peptide
ETFYVDGAANR

SEQ ID NO: 2765 - protein, 10 aa, Artificial Sequence
  Description of Artificial Sequence: Synthetic peptide
DNSDIKVVPR

SEQ ID NO: 2766 - protein, 9 aa, Artificial Sequence
  Description of Artificial Sequence: Synthetic peptide
TNQNVMMQR

SEQ ID NO: 2767 - protein, 11 aa, Artificial Sequence
  Description of Artificial Sequence: Synthetic peptide
DTEELSALVER

SEQ ID NO: 2768 - protein, 11 aa, Artificial Sequence
  Description of Artificial Sequence: Synthetic peptide
DTLQKVAEQLR

SEQ ID NO: 2769 - protein, 9 aa, Artificial Sequence
  Description of Artificial Sequence: Synthetic peptide
QNTNIMIQR

SEQ ID NO: 2770 - protein, 9 aa, Artificial Sequence
  Description of Artificial Sequence: Synthetic peptide
DIQTKELQR

SEQ ID NO: 2771 - protein, 9 aa, Artificial Sequence
  Description of Artificial Sequence: Synthetic peptide
TNTNIMMQR

SEQ ID NO: 2772 - protein, 9 aa, Artificial Sequence
  Description of Artificial Sequence: Synthetic peptide
SNYTNIIYR

SEQ ID NO: 2773 - protein, 10 aa, Artificial Sequence
  Description of Artificial Sequence: Synthetic peptide
DNGDIKVVPR

SEQ ID NO: 2774 - protein, 11 aa, Artificial Sequence
  Description of Artificial Sequence: Synthetic peptide
DVKQLTEAVQK

SEQ ID NO: 2775 - protein, 9 aa, Artificial Sequence
  Description of Artificial Sequence: Synthetic peptide
QSNPYPTPR

SEQ ID NO: 2776 - protein, 9 aa, Artificial Sequence
  Description of Artificial Sequence: Synthetic peptide
DAKAYATEK

SEQ ID NO: 2777 - protein, 11 aa, Artificial Sequence
  Description of Artificial Sequence: Synthetic peptide
DTGSSSSQNYR

SEQ ID NO: 2778 - protein, 11 aa, Artificial Sequence
  Description of Artificial Sequence: Synthetic peptide
QVQNTNIMIQR

SEQ ID NO: 2779 - protein, 9 aa, Artificial Sequence
  Description of Artificial Sequence: Synthetic peptide
DTQPYRLIR

SEQ ID NO: 2780 - protein, 9 aa, Artificial Sequence
  Description of Artificial Sequence: Synthetic peptide
DGLIYSQKR

SEQ ID NO: 2781 - protein, 9 aa, Artificial Sequence
  Description of Artificial Sequence: Synthetic peptide
DSISERVLR

SEQ ID NO: 2782 - protein, 11 aa, Artificial Sequence
  Description of Artificial Sequence: Synthetic peptide
EPLGIAPTKAR

SEQ ID NO: 2783 - protein, 9 aa, Artificial Sequence
  Description of Artificial Sequence: Synthetic peptide
NITGIILTR

SEQ ID NO: 2784 - protein, 8 aa, Artificial Sequence
  Description of Artificial Sequence: Synthetic peptide
NTNIMIQR

SEQ ID NO: 2785 - protein, 9 aa, Artificial Sequence
  Description of Artificial Sequence: Synthetic peptide
DAWEKIRLR

SEQ ID NO: 2786 - protein, 9 aa, Artificial Sequence
  Description of Artificial Sequence: Synthetic peptide
QARVLAVER

SEQ ID NO: 2787 - protein, 11 aa, Artificial Sequence
  Description of Artificial Sequence: Synthetic peptide
EARKFSSEQNR

SEQ ID NO: 2788 - protein, 11 aa, Artificial Sequence
  Description of Artificial Sequence: Synthetic peptide
DLGTRGAVTIR

SEQ ID NO: 2789 - protein, 9 aa, Artificial Sequence
  Description of Artificial Sequence: Synthetic peptide
DSHLALRHR

SEQ ID NO: 2790 - protein, 10 aa, Artificial Sequence
  Description of Artificial Sequence: Synthetic peptide
STNQNVMMQR

SEQ ID NO: 2791 - protein, 9 aa, Artificial Sequence
  Description of Artificial Sequence: Synthetic peptide
QSNPYPKPR

SEQ ID NO: 2792 - protein, 9 aa, Artificial Sequence
  Description of Artificial Sequence: Synthetic peptide
NITGMILTR

SEQ ID NO: 2793 - protein, 9 aa, Artificial Sequence
  Description of Artificial Sequence: Synthetic peptide
MVHQAISPR

SEQ ID NO: 2794 - protein, 11 aa, Artificial Sequence
  Description of Artificial Sequence: Synthetic peptide
ETFYVDGAANR

SEQ ID NO: 2795 - protein, 9 aa, Artificial Sequence
  Description of Artificial Sequence: Synthetic peptide
SYNTTTILR

SEQ ID NO: 2796 - protein, 9 aa, Artificial Sequence
  Description of Artificial Sequence: Synthetic peptide
TNQNVMMQR

SEQ ID NO: 2797 - protein, 9 aa, Artificial Sequence
  Description of Artificial Sequence: Synthetic peptide
QNTNIMIQR

SEQ ID NO: 2798 - protein, 9 aa, Artificial Sequence
  Description of Artificial Sequence: Synthetic peptide
TNTNIMMQR

SEQ ID NO: 2799 - protein, 9 aa, Artificial Sequence
  Description of Artificial Sequence: Synthetic peptide
QSNPYPTPR

SEQ ID NO: 2800 - protein, 9 aa, Artificial Sequence
  Description of Artificial Sequence: Synthetic peptide
EYKKIKKQR

SEQ ID NO: 2801 - protein, 9 aa, Artificial Sequence
  Description of Artificial Sequence: Synthetic peptide
MVHQAISPR

SEQ ID NO: 2802 - protein, 11 aa, Artificial Sequence
  Description of Artificial Sequence: Synthetic peptide
QVQNTNIMIQR

SEQ ID NO: 2803 - protein, 9 aa, Artificial Sequence
  Description of Artificial Sequence: Synthetic peptide
QSNPYPKPR

SEQ ID NO: 2804 - protein, 9 aa, Artificial Sequence
  Description of Artificial Sequence: Synthetic peptide
SNYTNIIYR

SEQ ID NO: 2805 - protein, 10 aa, Artificial Sequence
  Description of Artificial Sequence: Synthetic peptide
DNSDIKVVPR

SEQ ID NO: 2806 - protein, 9 aa, Artificial Sequence
  Description of Artificial Sequence: Synthetic peptide
MVHQAVSPR

SEQ ID NO: 2807 - protein, 9 aa, Artificial Sequence
  Description of Artificial Sequence: Synthetic peptide
QARVLAVER

SEQ ID NO: 2808 - protein, 8 aa, Artificial Sequence
  Description of Artificial Sequence: Synthetic peptide
NTNIMIQR

SEQ ID NO: 2809 - protein, 8 aa, Artificial Sequence
  Description of Artificial Sequence: Synthetic peptide
NTNIMMQR

SEQ ID NO: 2810 - protein, 9 aa, Artificial Sequence
  Description of Artificial Sequence: Synthetic peptide
FYVDGAANR

SEQ ID NO: 2811 - protein, 10 aa, Artificial Sequence
  Description of Artificial Sequence: Synthetic peptide
STNTNIMMQR

SEQ ID NO: 2812 - protein, 11 aa, Artificial Sequence
  Description of Artificial Sequence: Synthetic peptide
DTGSSSSQNYR

SEQ ID NO: 2813 - protein, 11 aa, Artificial Sequence
  Description of Artificial Sequence: Synthetic peptide
DTLQKVAEQLR

SEQ ID NO: 2814 - protein, 11 aa, Artificial Sequence
  Description of Artificial Sequence: Synthetic peptide
TVNDIQKLVGK

SEQ ID NO: 2815 - protein, 9 aa, Artificial Sequence
  Description of Artificial Sequence: Synthetic peptide
EQSLPHAQR

SEQ ID NO: 2816 - protein, 11 aa, Artificial Sequence
  Description of Artificial Sequence: Synthetic peptide
EPLGIAPTKAR

SEQ ID NO: 2817 - protein, 11 aa, Artificial Sequence
  Description of Artificial Sequence: Synthetic peptide
EARKFSSEQNR

SEQ ID NO: 2818 - protein, 10 aa, Artificial Sequence
  Description of Artificial Sequence: Synthetic peptide
STNQNVMMQR

SEQ ID NO: 2819 - protein, 11 aa, Artificial Sequence
  Description of Artificial Sequence: Synthetic peptide
EARKLSPEQNR

SEQ ID NO: 2820 - protein, 9 aa, Artificial Sequence
  Description of Artificial Sequence: Synthetic peptide
EYRKIKKQR

SEQ ID NO: 2821 - protein, 9 aa, Artificial Sequence
  Description of Artificial Sequence: Synthetic peptide
QYKELKKQR

SEQ ID NO: 2822 - protein, 9 aa, Artificial Sequence
  Description of Artificial Sequence: Synthetic peptide
QARVLAIER

SEQ ID NO: 2823 - protein, 10 aa, Artificial Sequence
  Description of Artificial Sequence: Synthetic peptide
EVHIPLGEAR

SEQ ID NO: 2824 - protein, 9 aa, Artificial Sequence
  Description of Artificial Sequence: Synthetic peptide
NNKIIGDIR

SEQ ID NO: 2825 - protein, 11 aa, Artificial Sequence
  Description of Artificial Sequence: Synthetic peptide
DTREGVEAIVR

SEQ ID NO: 2826 - protein, 10 aa, Artificial Sequence
  Description of Artificial Sequence: Synthetic peptide
DNGDIKVVPR

SEQ ID NO: 2827 - protein, 9 aa, Artificial Sequence
  Description of Artificial Sequence: Synthetic peptide
NSDIKVVPR

SEQ ID NO: 2828 - protein, 9 aa, Artificial Sequence
  Description of Artificial Sequence: Synthetic peptide
NITGIILTR

SEQ ID NO: 2829 - protein, 8 aa, Artificial Sequence
  Description of Artificial Sequence: Synthetic peptide
NQNVMMQR

SEQ ID NO: 2830 - protein, 11 aa, Artificial Sequence
  Description of Artificial Sequence: Synthetic peptide
EPLGIAPTEAR

SEQ ID NO: 2831 - protein, 9 aa, Artificial Sequence
  Description of Artificial Sequence: Synthetic peptide
QIYAGIKVR

SEQ ID NO: 2832 - protein, 10 aa, Artificial Sequence
  Description of Artificial Sequence: Synthetic peptide
SNITGIILTR

SEQ ID NO: 2833 - protein, 9 aa, Artificial Sequence
  Description of Artificial Sequence: Synthetic peptide
TVKIEGQLR

SEQ ID NO: 2834 - protein, 10 aa, Artificial Sequence
  Description of Artificial Sequence: Synthetic peptide
EQHTPTISLR

SEQ ID NO: 2835 - protein, 8 aa, Artificial Sequence
  Description of Artificial Sequence: Synthetic peptide
ENLAFQQR

SEQ ID NO: 2836 - protein, 10 aa, Artificial Sequence
  Description of Artificial Sequence: Synthetic peptide
ELKKIIGQVR

SEQ ID NO: 2837 - protein, 9 aa, Artificial Sequence
  Description of Artificial Sequence: Synthetic peptide
IIGEIVSPR

SEQ ID NO: 2838 - protein, 11 aa, Artificial Sequence
  Description of Artificial Sequence: Synthetic peptide
ETFRPGGGDMR

SEQ ID NO: 2839 - protein, 9 aa, Artificial Sequence
  Description of Artificial Sequence: Synthetic peptide
EFDRSLARR

SEQ ID NO: 2840 - protein, 9 aa, Artificial Sequence
  Description of Artificial Sequence: Synthetic peptide
ELDVVLLNR

SEQ ID NO: 2841 - protein, 11 aa, Artificial Sequence
  Description of Artificial Sequence: Synthetic peptide
ESNDTITLQCR

SEQ ID NO: 2842 - protein, 11 aa, Artificial Sequence
  Description of Artificial Sequence: Synthetic peptide
DTEELSALVER

SEQ ID NO: 2843 - protein, 9 aa, Artificial Sequence
  Description of Artificial Sequence: Synthetic peptide
FNLPPIVAK

SEQ ID NO: 2844 - protein, 9 aa, Artificial Sequence
  Description of Artificial Sequence: Synthetic peptide
GTRGAVTIR

SEQ ID NO: 2845 - protein, 9 aa, Artificial Sequence
  Description of Artificial Sequence: Synthetic peptide
NITGMILTR

SEQ ID NO: 2846 - protein, 11 aa, Artificial Sequence
  Description of Artificial Sequence: Synthetic peptide
EISNYTNIIYR

SEQ ID NO: 2847 - protein, 10 aa, Artificial Sequence
  Description of Artificial Sequence: Synthetic peptide
MRRTPPTAQR

SEQ ID NO: 2848 - protein, 9 aa, Artificial Sequence
  Description of Artificial Sequence: Synthetic peptide
DSISERVLR

SEQ ID NO: 2849 - protein, 9 aa, Artificial Sequence
  Description of Artificial Sequence: Synthetic peptide
EAMSQIHST

SEQ ID NO: 2850 - protein, 10 aa, Artificial Sequence
  Description of Artificial Sequence: Synthetic peptide
EVHIPLKEAR

SEQ ID NO: 2851 - protein, 9 aa, Artificial Sequence
  Description of Artificial Sequence: Synthetic peptide
EPVQINCTR

SEQ ID NO: 2852 - protein, 11 aa, Artificial Sequence
  Description of Artificial Sequence: Synthetic peptide
ETFYVDGAANR

SEQ ID NO: 2853 - protein, 11 aa, Artificial Sequence
  Description of Artificial Sequence: Synthetic peptide
QVQNTNIMIQR

SEQ ID NO: 2854 - protein, 9 aa, Artificial Sequence
  Description of Artificial Sequence: Synthetic peptide
NITGIILTR

SEQ ID NO: 2855 - protein, 10 aa, Artificial Sequence
  Description of Artificial Sequence: Synthetic peptide
STNTNIMMQR

SEQ ID NO: 2856 - protein, 10 aa, Artificial Sequence
  Description of Artificial Sequence: Synthetic peptide
STNQNVMMQR

SEQ ID NO: 2857 - protein, 9 aa, Artificial Sequence
  Description of Artificial Sequence: Synthetic peptide
QNTNIMIQR

SEQ ID NO: 2858 - protein, 10 aa, Artificial Sequence
  Description of Artificial Sequence: Synthetic peptide
NTSGSNTLYR

SEQ ID NO: 2859 - protein, 11 aa, Artificial Sequence
  Description of Artificial Sequence: Synthetic peptide
DTGSSSSQNYR

SEQ ID NO: 2860 - protein, 11 aa, Artificial Sequence
  Description of Artificial Sequence: Synthetic peptide
DTEELSALVER

SEQ ID NO: 2861 - protein, 9 aa, Artificial Sequence
  Description of Artificial Sequence: Synthetic peptide
EIVNQIIEK

SEQ ID NO: 2862 - protein, 10 aa, Artificial Sequence
  Description of Artificial Sequence: Synthetic peptide
DNSDIKVVPR

SEQ ID NO: 2863 - protein, 9 aa, Artificial Sequence
  Description of Artificial Sequence: Synthetic peptide
TNTNIMMQR

SEQ ID NO: 2864 - protein, 11 aa, Artificial Sequence
  Description of Artificial Sequence: Synthetic peptide
EISNYTNIIYR

SEQ ID NO: 2865 - protein, 11 aa, Artificial Sequence
  Description of Artificial Sequence: Synthetic peptide
TVNDIQKLVGK

SEQ ID NO: 2866 - protein, 11 aa, Artificial Sequence
  Description of Artificial Sequence: Synthetic peptide
ETFRPGGGDMR

SEQ ID NO: 2867 - protein, 9 aa, Artificial Sequence
  Description of Artificial Sequence: Synthetic peptide
EPVQINCTR

SEQ ID NO: 2868 - protein, 9 aa, Artificial Sequence
  Description of Artificial Sequence: Synthetic peptide
NITGMILTR

SEQ ID NO: 2869 - protein, 11 aa, Artificial Sequence
  Description of Artificial Sequence: Synthetic peptide
QSTNTNIMMQR

SEQ ID NO: 2870 - protein, 10 aa, Artificial Sequence
  Description of Artificial Sequence: Synthetic peptide
DCFSESAIRR

SEQ ID NO: 2871 - protein, 11 aa, Artificial Sequence
  Description of Artificial Sequence: Synthetic peptide
EIASSSKQELR

SEQ ID NO: 2872 - protein, 11 aa, Artificial Sequence
  Description of Artificial Sequence: Synthetic peptide
DTREGVEAIVR

SEQ ID NO: 2873 - protein, 9 aa, Artificial Sequence
  Description of Artificial Sequence: Synthetic peptide
QSNPYPTPR

SEQ ID NO: 2874 - protein, 11 aa, Artificial Sequence
  Description of Artificial Sequence: Synthetic peptide
DSFLVEAGTEK

SEQ ID NO: 2875 - protein, 9 aa, Artificial Sequence
  Description of Artificial Sequence: Synthetic peptide
ELVNQIIEK

SEQ ID NO: 2876 - protein, 9 aa, Artificial Sequence
  Description of Artificial Sequence: Synthetic peptide
DSISERVLR

SEQ ID NO: 2877 - protein, 10 aa, Artificial Sequence
  Description of Artificial Sequence: Synthetic peptide
EVNIVTDSQY

SEQ ID NO: 2878 - protein, 9 aa, Artificial Sequence
  Description of Artificial Sequence: Synthetic peptide
EPLGVAPTR

SEQ ID NO: 2879 - protein, 9 aa, Artificial Sequence
  Description of Artificial Sequence: Synthetic peptide
NSDIKVVPR

SEQ ID NO: 2880 - protein, 9 aa, Artificial Sequence
  Description of Artificial Sequence: Synthetic peptide
IIGEIVSPR

SEQ ID NO: 2881 - protein, 9 aa, Artificial Sequence
  Description of Artificial Sequence: Synthetic peptide
IVIEICEKR

SEQ ID NO: 2882 - protein, 9 aa, Artificial Sequence
  Description of Artificial Sequence: Synthetic peptide
TSGSNTLYR

SEQ ID NO: 2883 - protein, 10 aa, Artificial Sequence
  Description of Artificial Sequence: Synthetic peptide
SNITGIILTR

SEQ ID NO: 2884 - protein, 10 aa, Artificial Sequence
  Description of Artificial Sequence: Synthetic peptide
ASITLTVQAR

SEQ ID NO: 2885 - protein, 11 aa, Artificial Sequence
  Description of Artificial Sequence: Synthetic peptide
IVSLTETTNQR

SEQ ID NO: 2886 - protein, 9 aa, Artificial Sequence
  Description of Artificial Sequence: Synthetic peptide
TNQNVMMQR

SEQ ID NO: 2887 - protein, 9 aa, Artificial Sequence
  Description of Artificial Sequence: Synthetic peptide
FAIITVVNR

SEQ ID NO: 2888 - protein, 11 aa, Artificial Sequence
  Description of Artificial Sequence: Synthetic peptide
DVKQLTEAVQK

SEQ ID NO: 2889 - protein, 9 aa, Artificial Sequence
  Description of Artificial Sequence: Synthetic peptide
MVHQAVSPR

SEQ ID NO: 2890 - protein, 10 aa, Artificial Sequence
  Description of Artificial Sequence: Synthetic peptide
DTIAVAVAEW

SEQ ID NO: 2891 - protein, 10 aa, Artificial Sequence
  Description of Artificial Sequence: Synthetic peptide
DNGDIKVVPR

SEQ ID NO: 2892 - protein, 9 aa, Artificial Sequence
  Description of Artificial Sequence: Synthetic peptide
SNYTNIIYR

SEQ ID NO: 2893 - protein, 11 aa, Artificial Sequence
  Description of Artificial Sequence: Synthetic peptide
TSNITGIILTR

SEQ ID NO: 2894 - protein, 10 aa, Artificial Sequence
  Description of Artificial Sequence: Synthetic peptide
TGSSSSQNYR

SEQ ID NO: 2895 - protein, 11 aa, Artificial Sequence
  Description of Artificial Sequence: Synthetic peptide
QSQGAETGVGR

SEQ ID NO: 2896 - protein, 8 aa, Artificial Sequence
  Description of Artificial Sequence: Synthetic peptide
TDIVPLTR

SEQ ID NO: 2897 - protein, 11 aa, Artificial Sequence
  Description of Artificial Sequence: Synthetic peptide
DTLQKVAEQLR

SEQ ID NO: 2898 - protein, 11 aa, Artificial Sequence
  Description of Artificial Sequence: Synthetic peptide
TSNITGMILTR

SEQ ID NO: 2899 - protein, 11 aa, Artificial Sequence
  Description of Artificial Sequence: Synthetic peptide
HSTNQNVMMQR

SEQ ID NO: 2900 - protein, 9 aa, Artificial Sequence
  Description of Artificial Sequence: Synthetic peptide
MVHQAISPR

SEQ ID NO: 2901 - protein, 11 aa, Artificial Sequence
  Description of Artificial Sequence: Synthetic peptide
IVIAIISVVKR

SEQ ID NO: 2902 - protein, 11 aa, Artificial Sequence
  Description of Artificial Sequence: Synthetic peptide
QSQGTETGVGR

SEQ ID NO: 2903 - protein, 10 aa, Artificial Sequence
  Description of Artificial Sequence: Synthetic peptide
DIIATDIQTK

SEQ ID NO: 2904 - protein, 9 aa, Artificial Sequence
  Description of Artificial Sequence: Synthetic peptide
SYNTTTILR

SEQ ID NO: 2905 - protein, 11 aa, Artificial Sequence
  Description of Artificial Sequence: Synthetic peptide
VGPTPVNIIGR

SEQ ID NO: 2906 - protein, 10 aa, Artificial Sequence
  Description of Artificial Sequence: Synthetic peptide
AIIGEIVSPR

SEQ ID NO: 2907 - protein, 9 aa, Artificial Sequence
  Description of Artificial Sequence: Synthetic peptide
IAIISVVKR

SEQ ID NO: 2908 - protein, 10 aa, Artificial Sequence
  Description of Artificial Sequence: Synthetic peptide
VQNTNIMIQR

SEQ ID NO: 2909 - protein, 9 aa, Artificial Sequence
  Description of Artificial Sequence: Synthetic peptide
ETAYFILKL

SEQ ID NO: 2910 - protein, 9 aa, Artificial Sequence
  Description of Artificial Sequence: Synthetic peptide
ETAYFLLKL

SEQ ID NO: 2911 - protein, 9 aa, Artificial Sequence
  Description of Artificial Sequence: Synthetic peptide
NTIAVLYYV

SEQ ID NO: 2912 - protein, 9 aa, Artificial Sequence
  Description of Artificial Sequence: Synthetic peptide
DTAYFILKL

SEQ ID NO: 2913 - protein, 9 aa, Artificial Sequence
  Description of Artificial Sequence: Synthetic peptide
EVYSLFYKL

SEQ ID NO: 2914 - protein, 9 aa, Artificial Sequence
  Description of Artificial Sequence: Synthetic peptide
NTIAVLYFV

SEQ ID NO: 2915 - protein, 9 aa, Artificial Sequence
  Description of Artificial Sequence: Synthetic peptide
IVIAIISVV

SEQ ID NO: 2916 - protein, 9 aa, Artificial Sequence
  Description of Artificial Sequence: Synthetic peptide
NTSTITQAC

SEQ ID NO: 2917 - protein, 9 aa, Artificial Sequence
  Description of Artificial Sequence: Synthetic peptide
HISSISERI

SEQ ID NO: 2918 - protein, 9 aa, Artificial Sequence
  Description of Artificial Sequence: Synthetic peptide
NTSVITQAC

SEQ ID NO: 2919 - protein, 9 aa, Artificial Sequence
  Description of Artificial Sequence: Synthetic peptide
EVIPMFTAL

SEQ ID NO: 2920 - protein, 11 aa, Artificial Sequence
  Description of Artificial Sequence: Synthetic peptide
DIVQINSTDNV

SEQ ID NO: 2921 - protein, 9 aa, Artificial Sequence
  Description of Artificial Sequence: Synthetic peptide
TVNDIQKLV

SEQ ID NO: 2922 - protein, 9 aa, Artificial Sequence
  Description of Artificial Sequence: Synthetic peptide
KAADLWVTV

SEQ ID NO: 2923 - protein, 9 aa, Artificial Sequence
  Description of Artificial Sequence: Synthetic peptide
IVFAIITVV

SEQ ID NO: 2924 - protein, 9 aa, Artificial Sequence
  Description of Artificial Sequence: Synthetic peptide
YTAFTIPSI

SEQ ID NO: 2925 - protein, 9 aa, Artificial Sequence
  Description of Artificial Sequence: Synthetic peptide
AVAEWTDRV

SEQ ID NO: 2926 - protein, 9 aa, Artificial Sequence
  Description of Artificial Sequence: Synthetic peptide
GAASITLTV

SEQ ID NO: 2927 - protein, 9 aa, Artificial Sequence
  Description of Artificial Sequence: Synthetic peptide
TTSTLQEQI

SEQ ID NO: 2928 - protein, 10 aa, Artificial Sequence
  Description of Artificial Sequence: Synthetic peptide
ESSGILGSGI

SEQ ID NO: 2929 - protein, 9 aa, Artificial Sequence
  Description of Artificial Sequence: Synthetic peptide
IVNQIIEKL

SEQ ID NO: 2930 - protein, 9 aa, Artificial Sequence
  Description of Artificial Sequence: Synthetic peptide
EISNYTETI

SEQ ID NO: 2931 - protein, 9 aa, Artificial Sequence
  Description of Artificial Sequence: Synthetic peptide
EVIPMFSAL

SEQ ID NO: 2932 - protein, 9 aa, Artificial Sequence
  Description of Artificial Sequence: Synthetic peptide
EIIGDIRQA

SEQ ID NO: 2933 - protein, 9 aa, Artificial Sequence
  Description of Artificial Sequence: Synthetic peptide
DTITLQCRI

SEQ ID NO: 2934 - protein, 10 aa, Artificial Sequence
  Description of Artificial Sequence: Synthetic peptide
EIVNQIIEKL

SEQ ID NO: 2935 - protein, 9 aa, Artificial Sequence
  Description of Artificial Sequence: Synthetic peptide
TQSPINEEI

SEQ ID NO: 2936 - protein, 9 aa, Artificial Sequence
  Description of Artificial Sequence: Synthetic peptide
ETTNQRTEL

SEQ ID NO: 2937 - protein, 9 aa, Artificial Sequence
  Description of Artificial Sequence: Synthetic peptide
SAISLFDTI

SEQ ID NO: 2938 - protein, 11 aa, Artificial Sequence
  Description of Artificial Sequence: Synthetic peptide
ETFYVDGAANR

SEQ ID NO: 2939 - protein, 9 aa, Artificial Sequence
  Description of Artificial Sequence: Synthetic peptide
DVKQLTEAV

SEQ ID NO: 2940 - protein, 9 aa, Artificial Sequence
  Description of Artificial Sequence: Synthetic peptide
MTSNPPIPV

SEQ ID NO: 2941 - protein, 9 aa, Artificial Sequence
  Description of Artificial Sequence: Synthetic peptide
LVNQIIEKL

SEQ ID NO: 2942 - protein, 9 aa, Artificial Sequence
  Description of Artificial Sequence: Synthetic peptide
IAARIVELV

SEQ ID NO: 2943 - protein, 9 aa, Artificial Sequence
  Description of Artificial Sequence: Synthetic peptide
MTSDPPIPV

SEQ ID NO: 2944 - protein, 10 aa, Artificial Sequence
  Description of Artificial Sequence: Synthetic peptide
DTIAVAVAEW

SEQ ID NO: 2945 - protein, 9 aa, Artificial Sequence
  Description of Artificial Sequence: Synthetic peptide
DIAGATSNL

SEQ ID NO: 2946 - protein, 9 aa, Artificial Sequence
  Description of Artificial Sequence: Synthetic peptide
KATDLWVTV

SEQ ID NO: 2947 - protein, 9 aa, Artificial Sequence
  Description of Artificial Sequence: Synthetic peptide
SPAIFQSSM

SEQ ID NO: 2948 - protein, 9 aa, Artificial Sequence
  Description of Artificial Sequence: Synthetic peptide
VPLTREAEL

SEQ ID NO: 2949 - protein, 9 aa, Artificial Sequence
  Description of Artificial Sequence: Synthetic peptide
TPTISLRSL

SEQ ID NO: 2950 - protein, 9 aa, Artificial Sequence
  Description of Artificial Sequence: Synthetic peptide
RPQVPLRAM

SEQ ID NO: 2951 - protein, 9 aa, Artificial Sequence
  Description of Artificial Sequence: Synthetic peptide
TPAISLKSL

SEQ ID NO: 2952 - protein, 9 aa, Artificial Sequence
  Description of Artificial Sequence: Synthetic peptide
GPSHKARVL

SEQ ID NO: 2953 - protein, 9 aa, Artificial Sequence
  Description of Artificial Sequence: Synthetic peptide
NPAISLKSL

SEQ ID NO: 2954 - protein, 10 aa, Artificial Sequence
  Description of Artificial Sequence: Synthetic peptide
RPNNNTRKSI

SEQ ID NO: 2955 - protein, 9 aa, Artificial Sequence
  Description of Artificial Sequence: Synthetic peptide
RPVASTQLL

SEQ ID NO: 2956 - protein, 9 aa, Artificial Sequence
  Description of Artificial Sequence: Synthetic peptide
EPYNPAISL

SEQ ID NO: 2957 - protein, 9 aa, Artificial Sequence
  Description of Artificial Sequence: Synthetic peptide
RVRDGTSRP

SEQ ID NO: 2958 - protein, 9 aa, Artificial Sequence
  Description of Artificial Sequence: Synthetic peptide
IPTPRPEGL

SEQ ID NO: 2959 - protein, 8 aa, Artificial Sequence
  Description of Artificial Sequence: Synthetic peptide
RPVVSTQL

SEQ ID NO: 2960 - protein, 9 aa, Artificial Sequence
  Description of Artificial Sequence: Synthetic peptide
KPVASTQLL

SEQ ID NO: 2961 - protein, 9 aa, Artificial Sequence
  Description of Artificial Sequence: Synthetic peptide
EPSTPAISL

SEQ ID NO: 2962 - protein, 10 aa, Artificial Sequence
  Description of Artificial Sequence: Synthetic peptide
SPIETVPVKL

SEQ ID NO: 2963 - protein, 10 aa, Artificial Sequence
  Description of Artificial Sequence: Synthetic peptide
SIRFGPGQAF

SEQ ID NO: 2964 - protein, 8 aa, Artificial Sequence
  Description of Artificial Sequence: Synthetic peptide
RPVASTQL

SEQ ID NO: 2965 - protein, 9 aa, Artificial Sequence
  Description of Artificial Sequence: Synthetic peptide
RVRDGASRP

SEQ ID NO: 2966 - protein, 9 aa, Artificial Sequence
  Description of Artificial Sequence: Synthetic peptide
GVRPTPPAA

SEQ ID NO: 2967 - protein, 10 aa, Artificial Sequence
  Description of Artificial Sequence: Synthetic peptide
SPAAPGVGAV

SEQ ID NO: 2968 - protein, 9 aa, Artificial Sequence
  Description of Artificial Sequence: Synthetic peptide
SIAARTVTL

SEQ ID NO: 2969 - protein, 9 aa, Artificial Sequence
  Description of Artificial Sequence: Synthetic peptide
TPQDLNTML

SEQ ID NO: 2970 - protein, 9 aa, Artificial Sequence
  Description of Artificial Sequence: Synthetic peptide
VPLTREAEL

SEQ ID NO: 2971 - protein, 8 aa, Artificial Sequence
  Description of Artificial Sequence: Synthetic peptide
EAVQKIVM

SEQ ID NO: 2972 - protein, 9 aa, Artificial Sequence
  Description of Artificial Sequence: Synthetic peptide
SIAARTVTL

SEQ ID NO: 2973 - protein, 9 aa, Artificial Sequence
  Description of Artificial Sequence: Synthetic peptide
QLQARVLAL

SEQ ID NO: 2974 - protein, 8 aa, Artificial Sequence
  Description of Artificial Sequence: Synthetic peptide
NPIPKQSL

SEQ ID NO: 2975 - protein, 8 aa, Artificial Sequence
  Description of Artificial Sequence: Synthetic peptide
EAVQKITM

SEQ ID NO: 2976 - protein, 9 aa, Artificial Sequence
  Description of Artificial Sequence: Synthetic peptide
ELKNSAISL

SEQ ID NO: 2977 - protein, 9 aa, Artificial Sequence
  Description of Artificial Sequence: Synthetic peptide
DIKQLTEAV

SEQ ID NO: 2978 - protein, 8 aa, Artificial Sequence
  Description of Artificial Sequence: Synthetic peptide
NPVPKQSL

SEQ ID NO: 2979 - protein, 9 aa, Artificial Sequence
  Description of Artificial Sequence: Synthetic peptide
DVKDTKEAL

SEQ ID NO: 2980 - protein, 8 aa, Artificial Sequence
  Description of Artificial Sequence: Synthetic peptide
ELVGHSSL

SEQ ID NO: 2981 - protein, 9 aa, Artificial Sequence
  Description of Artificial Sequence: Synthetic peptide
DVKQLTEAV

SEQ ID NO: 2982 - protein, 8 aa, Artificial Sequence
  Description of Artificial Sequence: Synthetic peptide
TTNQKTEL

SEQ ID NO: 2983 - protein, 9 aa, Artificial Sequence
  Description of Artificial Sequence: Synthetic peptide
ALKALVAST

SEQ ID NO: 2984 - protein, 8 aa, Artificial Sequence
  Description of Artificial Sequence: Synthetic peptide
HLKTAVQM

SEQ ID NO: 2985 - protein, 11 aa, Artificial Sequence
  Description of Artificial Sequence: Synthetic peptide
TQIDPDLADHL

SEQ ID NO: 2986 - protein, 10 aa, Artificial Sequence
  Description of Artificial Sequence: Synthetic peptide
HQNPVSEQSL

SEQ ID NO: 2987 - protein, 9 aa, Artificial Sequence
  Description of Artificial Sequence: Synthetic peptide
TQSPINEEI

SEQ ID NO: 2988 - protein, 9 aa, Artificial Sequence
  Description of Artificial Sequence: Synthetic peptide
GQDQWTYQI

SEQ ID NO: 2989 - protein, 9 aa, Artificial Sequence
  Description of Artificial Sequence: Synthetic peptide
VQINSTDNV

SEQ ID NO: 2990 - protein, 9 aa, Artificial Sequence
  Description of Artificial Sequence: Synthetic peptide
IQKQGQDQW

SEQ ID NO: 2991 - protein, 10 aa, Artificial Sequence
  Description of Artificial Sequence: Synthetic peptide
AQEESDEVGF

SEQ ID NO: 2992 - protein, 10 aa, Artificial Sequence
  Description of Artificial Sequence: Synthetic peptide
GQVRDQAEHL

SEQ ID NO: 2993 - protein, 10 aa, Artificial Sequence
  Description of Artificial Sequence: Synthetic peptide
RQIDSISERI

SEQ ID NO: 2994 - protein, 9 aa, Artificial Sequence
  Description of Artificial Sequence: Synthetic peptide
AQEEEEVGF

SEQ ID NO: 2995 - protein, 10 aa, Artificial Sequence
  Description of Artificial Sequence: Synthetic peptide
AQEEESEVGF

SEQ ID NO: 2996 - protein, 10 aa, Artificial Sequence
  Description of Artificial Sequence: Synthetic peptide
KQLTEAVQKI

SEQ ID NO: 2997 - protein, 9 aa, Artificial Sequence
  Description of Artificial Sequence: Synthetic peptide
GQELKTSAI

SEQ ID NO: 2998 - protein, 9 aa, Artificial Sequence
  Description of Artificial Sequence: Synthetic peptide
ALETGTEEL

SEQ ID NO: 2999 - protein, 10 aa, Artificial Sequence
  Description of Artificial Sequence: Synthetic peptide
HQNPVPKQSL

SEQ ID NO: 3000 - protein, 9 aa, Artificial Sequence
  Description of Artificial Sequence: Synthetic peptide
TQSPINEEI

SEQ ID NO: 3001 - protein, 9 aa, Artificial Sequence
  Description of Artificial Sequence: Synthetic peptide
VQFTEPVQI

SEQ ID NO: 3002 - protein, 9 aa, Artificial Sequence
  Description of Artificial Sequence: Synthetic peptide
GAASITLTV

SEQ ID NO: 3003 - protein, 9 aa, Artificial Sequence
  Description of Artificial Sequence: Synthetic peptide
QLTEAVQKI

SEQ ID NO: 3004 - protein, 9 aa, Artificial Sequence
  Description of Artificial Sequence: Synthetic peptide
SQIYAGIKV

SEQ ID NO: 3005 - protein, 9 aa, Artificial Sequence
  Description of Artificial Sequence: Synthetic peptide
GQAFYTNEI

SEQ ID NO: 3006 - protein, 8 aa, Artificial Sequence
  Description of Artificial Sequence: Synthetic peptide
GQMVHQAI

SEQ ID NO: 3007 - protein, 9 aa, Artificial Sequence
  Description of Artificial Sequence: Synthetic peptide
SQIYAGIQV

SEQ ID NO: 3008 - protein, 9 aa, Artificial Sequence
  Description of Artificial Sequence: Synthetic peptide
VQKIVMESI

SEQ ID NO: 3009 - protein, 9 aa, Artificial Sequence
  Description of Artificial Sequence: Synthetic peptide
GQVDCSPGI

SEQ ID NO: 3010 - protein, 9 aa, Artificial Sequence
  Description of Artificial Sequence: Synthetic peptide
GAASLTLTV

SEQ ID NO: 3011 - protein, 8 aa, Artificial Sequence
  Description of Artificial Sequence: Synthetic peptide
GQMVHQAV

SEQ ID NO: 3012 - protein, 9 aa, Artificial Sequence
  Description of Artificial Sequence: Synthetic peptide
HQISVESSV

SEQ ID NO: 3013 - protein, 9 aa, Artificial Sequence
  Description of Artificial Sequence: Synthetic peptide
VQKIATESI

SEQ ID NO: 3014 - protein, 9 aa, Artificial Sequence
  Description of Artificial Sequence: Synthetic peptide
VQKITMESI

SEQ ID NO: 3015 - protein, 9 aa, Artificial Sequence
  Description of Artificial Sequence: Synthetic peptide
GQDQWTYQI

SEQ ID NO: 3016 - protein, 9 aa, Artificial Sequence
  Description of Artificial Sequence: Synthetic peptide
AIITVVNRV

SEQ ID NO: 3017 - protein, 10 aa, Artificial Sequence
  Description of Artificial Sequence: Synthetic peptide
AQGQMVHQAI

SEQ ID NO: 3018 - protein, 9 aa, Artificial Sequence
  Description of Artificial Sequence: Synthetic peptide
GQGQWSYQI

SEQ ID NO: 3019 - protein, 9 aa, Artificial Sequence
  Description of Artificial Sequence: Synthetic peptide
VQFTKPVLI

SEQ ID NO: 3020 - protein, 9 aa, Artificial Sequence
  Description of Artificial Sequence: Synthetic peptide
VQNAQGQMV

SEQ ID NO: 3021 - protein, 9 aa, Artificial Sequence
  Description of Artificial Sequence: Synthetic peptide
VLAEAMSQI

SEQ ID NO: 3022 - protein, 8 aa, Artificial Sequence
  Description of Artificial Sequence: Synthetic peptide
GQDTAYFI

SEQ ID NO: 3023 - protein, 9 aa, Artificial Sequence
  Description of Artificial Sequence: Synthetic peptide
AILNIPTRI

SEQ ID NO: 3024 - protein, 9 aa, Artificial Sequence
  Description of Artificial Sequence: Synthetic peptide
QQHLLKLTV

SEQ ID NO: 3025 - protein, 9 aa, Artificial Sequence
  Description of Artificial Sequence: Synthetic peptide
QQSNLLQAI

SEQ ID NO: 3026 - protein, 9 aa, Artificial Sequence
  Description of Artificial Sequence: Synthetic peptide
QQQLLKLTV

SEQ ID NO: 3027 - protein, 9 aa, Artificial Sequence
  Description of Artificial Sequence: Synthetic peptide
VLAEAMSQV

SEQ ID NO: 3028 - protein, 9 aa, Artificial Sequence
  Description of Artificial Sequence: Synthetic peptide
VQINSTDNV

SEQ ID NO: 3029 - protein, 10 aa, Artificial Sequence
  Description of Artificial Sequence: Synthetic peptide
KQLTEAVQKI

SEQ ID NO: 3030 - protein, 9 aa, Artificial Sequence
  Description of Artificial Sequence: Synthetic peptide
QQQMLRLTV

SEQ ID NO: 3031 - protein, 9 aa, Artificial Sequence
  Description of Artificial Sequence: Synthetic peptide
VLAEAMSHV

SEQ ID NO: 3032 - protein, 8 aa, Artificial Sequence
  Description of Artificial Sequence: Synthetic peptide
SQVQNTNI

SEQ ID NO: 3033 - protein, 10 aa, Artificial Sequence
  Description of Artificial Sequence: Synthetic peptide
RQIDSISERV

SEQ ID NO: 3034 - protein, 9 aa, Artificial Sequence
  Description of Artificial Sequence: Synthetic peptide
SLAEGKVMI

SEQ ID NO: 3035 - protein, 10 aa, Artificial Sequence
  Description of Artificial Sequence: Synthetic peptide
SQVQNTNIMI

SEQ ID NO: 3036 - protein, 10 aa, Artificial Sequence
  Description of Artificial Sequence: Synthetic peptide
RQIDSISERI

SEQ ID NO: 3037 - protein, 10 aa, Artificial Sequence
  Description of Artificial Sequence: Synthetic peptide
AQGQMVHQAV

SEQ ID NO: 3038 - protein, 9 aa, Artificial Sequence
  Description of Artificial Sequence: Synthetic peptide
YQLEQEPIV

SEQ ID NO: 3039 - protein, 10 aa, Artificial Sequence
  Description of Artificial Sequence: Synthetic peptide
RQYDQIAIEI

SEQ ID NO: 3040 - protein, 9 aa, Artificial Sequence
  Description of Artificial Sequence: Synthetic peptide
AVSPAAPGV

SEQ ID NO: 3041 - protein, 9 aa, Artificial Sequence
  Description of Artificial Sequence: Synthetic peptide
QIHSTNQNV

SEQ ID NO: 3042 - protein, 11 aa, Artificial Sequence
  Description of Artificial Sequence: Synthetic peptide
VQQQSNLLQAI

SEQ ID NO: 3043 - protein, 9 aa, Artificial Sequence
  Description of Artificial Sequence: Synthetic peptide
VVKIEPLGI

SEQ ID NO: 3044 - protein, 10 aa, Artificial Sequence
  Description of Artificial Sequence: Synthetic peptide
SQIHSTNQNV

SEQ ID NO: 3045 - protein, 8 aa, Artificial Sequence
  Description of Artificial Sequence: Synthetic peptide
GQETAYFI

SEQ ID NO: 3046 - protein, 8 aa, Artificial Sequence
  Description of Artificial Sequence: Synthetic peptide
VQNTNIMI

SEQ ID NO: 3047 - protein, 9 aa, Artificial Sequence
  Description of Artificial Sequence: Synthetic peptide
ILSIVGLVV

SEQ ID NO: 3048 - protein, 9 aa, Artificial Sequence
  Description of Artificial Sequence: Synthetic peptide
GQLQPALET

SEQ ID NO: 3049 - protein, 10 aa, Artificial Sequence
  Description of Artificial Sequence: Synthetic peptide
KVVKLEPLGV

SEQ ID NO: 3050 - protein, 9 aa, Artificial Sequence
  Description of Artificial Sequence: Synthetic peptide
RVIELGQRI

SEQ ID NO: 3051 - protein, 9 aa, Artificial Sequence
  Description of Artificial Sequence: Synthetic peptide
ALQDSGLEV

SEQ ID NO: 3052 - protein, 9 aa, Artificial Sequence
  Description of Artificial Sequence: Synthetic peptide
VQFNKPVPI

SEQ ID NO: 3053 - protein, 9 aa, Artificial Sequence
  Description of Artificial Sequence: Synthetic peptide
ERYLQDQQL

SEQ ID NO: 3054 - protein, 9 aa, Artificial Sequence
  Description of Artificial Sequence: Synthetic peptide
ERYLKDQQL

SEQ ID NO: 3055 - protein, 8 aa, Artificial Sequence
  Description of Artificial Sequence: Synthetic peptide
ERILSTCL

SEQ ID NO: 3056 - protein, 9 aa, Artificial Sequence
  Description of Artificial Sequence: Synthetic peptide
NREPSTPAI

SEQ ID NO: 3057 - protein, 8 aa, Artificial Sequence
  Description of Artificial Sequence: Synthetic peptide
IRQLHSAL

SEQ ID NO: 3058 - protein, 8 aa, Artificial Sequence
  Description of Artificial Sequence: Synthetic peptide
IRQLQPAL

SEQ ID NO: 3059 - protein, 8 aa, Artificial Sequence
  Description of Artificial Sequence: Synthetic peptide
IRQLHSAL

SEQ ID NO: 3060 - protein, 9 aa, Artificial Sequence
  Description of Artificial Sequence: Synthetic peptide
ERYLKDQQL

SEQ ID NO: 3061 - protein, 9 aa, Artificial Sequence
  Description of Artificial Sequence: Synthetic peptide
ERYLQDQQL

SEQ ID NO: 3062 - protein, 8 aa, Artificial Sequence
  Description of Artificial Sequence: Synthetic peptide
ELVGHSSL

SEQ ID NO: 3063 - protein, 8 aa, Artificial Sequence
  Description of Artificial Sequence: Synthetic peptide
ERVLRTCL

SEQ ID NO: 3064 - protein, 8 aa, Artificial Sequence
  Description of Artificial Sequence: Synthetic peptide
GQMVHQAI

SEQ ID NO: 3065 - protein, 8 aa, Artificial Sequence
  Description of Artificial Sequence: Synthetic peptide
DLATHGAV

SEQ ID NO: 3066 - protein, 9 aa, Artificial Sequence
  Description of Artificial Sequence: Synthetic peptide
VPLTREAEL

SEQ ID NO: 3067 - protein, 9 aa, Artificial Sequence
  Description of Artificial Sequence: Synthetic peptide
VELVGHSSL

SEQ ID NO: 3068 - protein, 9 aa, Artificial Sequence
  Description of Artificial Sequence: Synthetic peptide
VELLGHCSL

SEQ ID NO: 3069 - protein, 8 aa, Artificial Sequence
  Description of Artificial Sequence: Synthetic peptide
IQKLVGKL

SEQ ID NO: 3070 - protein, 8 aa, Artificial Sequence
  Description of Artificial Sequence: Synthetic peptide
GQMVHQAV

SEQ ID NO: 3071 - protein, 8 aa, Artificial Sequence
  Description of Artificial Sequence: Synthetic peptide
GQYIYNTY

SEQ ID NO: 3072 - protein, 8 aa, Artificial Sequence
  Description of Artificial Sequence: Synthetic peptide
GQHIYNTY

SEQ ID NO: 3073 - protein, 9 aa, Artificial Sequence
  Description of Artificial Sequence: Synthetic peptide
RVMGTQRNY

SEQ ID NO: 3074 - protein, 9 aa, Artificial Sequence
  Description of Artificial Sequence: Synthetic peptide
TQACPKVSF

SEQ ID NO: 3075 - protein, 9 aa, Artificial Sequence
  Description of Artificial Sequence: Synthetic peptide
VQKIATESI

SEQ ID NO: 3076 - protein, 9 aa, Artificial Sequence
  Description of Artificial Sequence: Synthetic peptide
TQACPKVTF

SEQ ID NO: 3077 - protein, 9 aa, Artificial Sequence
  Description of Artificial Sequence: Synthetic peptide
TVLDVGDAY

SEQ ID NO: 3078 - protein, 9 aa, Artificial Sequence
  Description of Artificial Sequence: Synthetic peptide
RQITKIQNF

SEQ ID NO: 3079 - protein, 9 aa, Artificial Sequence
  Description of Artificial Sequence: Synthetic peptide
KAIEAQQQM

SEQ ID NO: 3080 - protein, 9 aa, Artificial Sequence
  Description of Artificial Sequence: Synthetic peptide
VQQEFGIPY

SEQ ID NO: 3081 - protein, 9 aa, Artificial Sequence
  Description of Artificial Sequence: Synthetic peptide
ATNLWVTVY

SEQ ID NO: 3082 - protein, 10 aa, Artificial Sequence
  Description of Artificial Sequence: Synthetic peptide
HQNPVSEQSL

SEQ ID NO: 3083 - protein, 9 aa, Artificial Sequence
  Description of Artificial Sequence: Synthetic peptide
SQVQNTNIM

SEQ ID NO: 3084 - protein, 10 aa, Artificial Sequence
  Description of Artificial Sequence: Synthetic peptide
LQWDKEISTY

SEQ ID NO: 3085 - protein, 10 aa, Artificial Sequence
  Description of Artificial Sequence: Synthetic peptide
FLNKGLGISY

SEQ ID NO: 3086 - protein, 10 aa, Artificial Sequence
  Description of Artificial Sequence: Synthetic peptide
HQNPVPKQSL

SEQ ID NO: 3087 - protein, 9 aa, Artificial Sequence
  Description of Artificial Sequence: Synthetic peptide
IQKQGQGQW

SEQ ID NO: 3088 - protein, 9 aa, Artificial Sequence
  Description of Artificial Sequence: Synthetic peptide
INKGLGISY

SEQ ID NO: 3089 - protein, 9 aa, Artificial Sequence
  Description of Artificial Sequence: Synthetic peptide
KQIIKIQNF

SEQ ID NO: 3090 - protein, 9 aa, Artificial Sequence
  Description of Artificial Sequence: Synthetic peptide
IQQEFGIPY

SEQ ID NO: 3091 - protein, 10 aa, Artificial Sequence
  Description of Artificial Sequence: Synthetic peptide
ILKDPVHGVY

SEQ ID NO: 3092 - protein, 9 aa, Artificial Sequence
  Description of Artificial Sequence: Synthetic peptide
KQGQGQWSY

SEQ ID NO: 3093 - protein, 8 aa, Artificial Sequence
  Description of Artificial Sequence: Synthetic peptide
AVHVASGY

SEQ ID NO: 3094 - protein, 10 aa, Artificial Sequence
  Description of Artificial Sequence: Synthetic peptide
FINKGLGISY

SEQ ID NO: 3095 - protein, 9 aa, Artificial Sequence
  Description of Artificial Sequence: Synthetic peptide
EQHTPTISL

SEQ ID NO: 3096 - protein, 11 aa, Artificial Sequence
  Description of Artificial Sequence: Synthetic peptide
IQKQGQDQWTY

SEQ ID NO: 3097 - protein, 9 aa, Artificial Sequence
  Description of Artificial Sequence: Synthetic peptide
KAIEAQQQL

SEQ ID NO: 3098 - protein, 9 aa, Artificial Sequence
  Description of Artificial Sequence: Synthetic peptide
FLGAAGSTM

SEQ ID NO: 3099 - protein, 8 aa, Artificial Sequence
  Description of Artificial Sequence: Synthetic peptide
GQMVHQAI

SEQ ID NO: 3100 - protein, 10 aa, Artificial Sequence
  Description of Artificial Sequence: Synthetic peptide
ILKNPVHGVY

SEQ ID NO: 3101 - protein, 9 aa, Artificial Sequence
  Description of Artificial Sequence: Synthetic peptide
RQGYSPVSF

SEQ ID NO: 3102 - protein, 9 aa, Artificial Sequence
  Description of Artificial Sequence: Synthetic peptide
KQGQDQWTY

SEQ ID NO: 3103 - protein, 9 aa, Artificial Sequence
  Description of Artificial Sequence: Synthetic peptide
IQKQGQDQW

SEQ ID NO: 3104 - protein, 8 aa, Artificial Sequence
  Description of Artificial Sequence: Synthetic peptide
LQKVAEQL

SEQ ID NO: 3105 - protein, 11 aa, Artificial Sequence
  Description of Artificial Sequence: Synthetic peptide
SQIHSTNQNVM

SEQ ID NO: 3106 - protein, 9 aa, Artificial Sequence
  Description of Artificial Sequence: Synthetic peptide
RAVGLGAAF

SEQ ID NO: 3107 - protein, 10 aa, Artificial Sequence
  Description of Artificial Sequence: Synthetic peptide
TEKQGTTHSY

SEQ ID NO: 3108 - protein, 9 aa, Artificial Sequence
  Description of Artificial Sequence: Synthetic peptide
VQSTNTNIM

SEQ ID NO: 3109 - protein, 9 aa, Artificial Sequence
  Description of Artificial Sequence: Synthetic peptide
SIVGLIVAF

SEQ ID NO: 3110 - protein, 9 aa, Artificial Sequence
  Description of Artificial Sequence: Synthetic peptide
GKNSINETF

SEQ ID NO: 3111 - protein, 10 aa, Artificial Sequence
  Description of Artificial Sequence: Synthetic peptide
GGNNGTNETF

SEQ ID NO: 3112 - protein, 9 aa, Artificial Sequence
  Description of Artificial Sequence: Synthetic peptide
TVLDVGDAY

SEQ ID NO: 3113 - protein, 9 aa, Artificial Sequence
  Description of Artificial Sequence: Synthetic peptide
FLGAAGSTM

SEQ ID NO: 3114 - protein, 9 aa, Artificial Sequence
  Description of Artificial Sequence: Synthetic peptide
ELVSPKCEY

SEQ ID NO: 3115 - protein, 10 aa, Artificial Sequence
  Description of Artificial Sequence: Synthetic peptide
FLNKGLGISY

SEQ ID NO: 3116 - protein, 9 aa, Artificial Sequence
  Description of Artificial Sequence: Synthetic peptide
TQACPKVSF

SEQ ID NO: 3117 - protein, 9 aa, Artificial Sequence
  Description of Artificial Sequence: Synthetic peptide
SAISLFDTI

SEQ ID NO: 3118 - protein, 9 aa, Artificial Sequence
  Description of Artificial Sequence: Synthetic peptide
TVGGHQAAM

SEQ ID NO: 3119 - protein, 9 aa, Artificial Sequence
  Description of Artificial Sequence: Synthetic peptide
EQHTPTISL

SEQ ID NO: 3120 - protein, 10 aa, Artificial Sequence
  Description of Artificial Sequence: Synthetic peptide
FINKGLGISY

SEQ ID NO: 3121 - protein, 9 aa, Artificial Sequence
  Description of Artificial Sequence: Synthetic peptide
TQACPKVTF

SEQ ID NO: 3122 - protein, 9 aa, Artificial Sequence
  Description of Artificial Sequence: Synthetic peptide
FLVEAGTEK

SEQ ID NO: 3123 - protein, 9 aa, Artificial Sequence
  Description of Artificial Sequence: Synthetic peptide
SQVQNTNIM

SEQ ID NO: 3124 - protein, 9 aa, Artificial Sequence
  Description of Artificial Sequence: Synthetic peptide
DLKNVTENF

SEQ ID NO: 3125 - protein, 9 aa, Artificial Sequence
  Description of Artificial Sequence: Synthetic peptide
EIVSPRCEY

SEQ ID NO: 3126 - protein, 8 aa, Artificial Sequence
  Description of Artificial Sequence: Synthetic peptide
GQYIYNTY

SEQ ID NO: 3127 - protein, 9 aa, Artificial Sequence
  Description of Artificial Sequence: Synthetic peptide
TIAVAVAEW

SEQ ID NO: 3128 - protein, 8 aa, Artificial Sequence
  Description of Artificial Sequence: Synthetic peptide
VPLRAMTY

SEQ ID NO: 3129 - protein, 9 aa, Artificial Sequence
  Description of Artificial Sequence: Synthetic peptide
NLANVTEDF

SEQ ID NO: 3130 - protein, 9 aa, Artificial Sequence
  Description of Artificial Sequence: Synthetic peptide
SAVNLVDAI

SEQ ID NO: 3131 - protein, 9 aa, Artificial Sequence
  Description of Artificial Sequence: Synthetic peptide
DAYFSVPLY

SEQ ID NO: 3132 - protein, 9 aa, Artificial Sequence
  Description of Artificial Sequence: Synthetic peptide
SAEPVPLQL

SEQ ID NO: 3133 - protein, 9 aa, Artificial Sequence
  Description of Artificial Sequence: Synthetic peptide
DIAGTTSTL

SEQ ID NO: 3134 - protein, 10 aa, Artificial Sequence
  Description of Artificial Sequence: Synthetic peptide
EVNIVTDSQY

SEQ ID NO: 3135 - protein, 9 aa, Artificial Sequence
  Description of Artificial Sequence: Synthetic peptide
EPYNPAISL

SEQ ID NO: 3136 - protein, 9 aa, Artificial Sequence
  Description of Artificial Sequence: Synthetic peptide
GKNSINETF

SEQ ID NO: 3137 - protein, 9 aa, Artificial Sequence
  Description of Artificial Sequence: Synthetic peptide
SKNSSYSTY

SEQ ID NO: 3138 - protein, 8 aa, Artificial Sequence
  Description of Artificial Sequence: Synthetic peptide
GQYIYNTY

SEQ ID NO: 3139 - protein, 8 aa, Artificial Sequence
  Description of Artificial Sequence: Synthetic peptide
AKNIIVQF

SEQ ID NO: 3140 - protein, 9 aa, Artificial Sequence
  Description of Artificial Sequence: Synthetic peptide
SKIGPENPY

SEQ ID NO: 3141 - protein, 8 aa, Artificial Sequence
  Description of Artificial Sequence: Synthetic peptide
GQHIYNTY

SEQ ID NO: 3142 - protein, 9 aa, Artificial Sequence
  Description of Artificial Sequence: Synthetic peptide
INKGLGISY

SEQ ID NO: 3143 - protein, 8 aa, Artificial Sequence
  Description of Artificial Sequence: Synthetic peptide
NKGLGISY

SEQ ID NO: 3144 - protein, 9 aa, Artificial Sequence
  Description of Artificial Sequence: Synthetic peptide
TKNPEIIIY

SEQ ID NO: 3145 - protein, 9 aa, Artificial Sequence
  Description of Artificial Sequence: Synthetic peptide
LKTPVHGVY

SEQ ID NO: 3146 - protein, 9 aa, Artificial Sequence
  Description of Artificial Sequence: Synthetic peptide
IRFGPGQAF

SEQ ID NO: 3147 - protein, 9 aa, Artificial Sequence
  Description of Artificial Sequence: Synthetic peptide
QKTELHAIY

SEQ ID NO: 3148 - protein, 9 aa, Artificial Sequence
  Description of Artificial Sequence: Synthetic peptide
LKNPVHGVY

SEQ ID NO: 3149 - protein, 9 aa, Artificial Sequence
  Description of Artificial Sequence: Synthetic peptide
VKVVEEKAF

SEQ ID NO: 3150 - protein, 9 aa, Artificial Sequence
  Description of Artificial Sequence: Synthetic peptide
GKRAIGTVL

SEQ ID NO: 3151 - protein, 9 aa, Artificial Sequence
  Description of Artificial Sequence: Synthetic peptide
RQGYSPVSF

SEQ ID NO: 3152 - protein, 9 aa, Artificial Sequence
  Description of Artificial Sequence: Synthetic peptide
TQACPKVSF

SEQ ID NO: 3153 - protein, 9 aa, Artificial Sequence
  Description of Artificial Sequence: Synthetic peptide
SHFPNATTI

SEQ ID NO: 3154 - protein, 9 aa, Artificial Sequence
  Description of Artificial Sequence: Synthetic peptide
IHSTNQNVM

SEQ ID NO: 3155 - protein, 9 aa, Artificial Sequence
  Description of Artificial Sequence: Synthetic peptide
YHTQIDPDL

SEQ ID NO: 3156 - protein, 9 aa, Artificial Sequence
  Description of Artificial Sequence: Synthetic peptide
THTNDIKQL

SEQ ID NO: 3157 - protein, 9 aa, Artificial Sequence
  Description of Artificial Sequence: Synthetic peptide
THLEGKVIL

SEQ ID NO: 3158 - protein, 9 aa, Artificial Sequence
  Description of Artificial Sequence: Synthetic peptide
THTNDVKQL

SEQ ID NO: 3159 - protein, 9 aa, Artificial Sequence
  Description of Artificial Sequence: Synthetic peptide
EHFPNKTII

SEQ ID NO: 3160 - protein, 9 aa, Artificial Sequence
  Description of Artificial Sequence: Synthetic peptide
HQAISPRTL

SEQ ID NO: 3161 - protein, 9 aa, Artificial Sequence
  Description of Artificial Sequence: Synthetic peptide
EQHTPTISL

SEQ ID NO: 3162 - protein, 9 aa, Artificial Sequence
  Description of Artificial Sequence: Synthetic peptide
HQAVSPRTL

SEQ ID NO: 3163 - protein, 9 aa, Artificial Sequence
  Description of Artificial Sequence: Synthetic peptide
EHLKTAVQM

SEQ ID NO: 3164 - protein, 10 aa, Artificial Sequence
  Description of Artificial Sequence: Synthetic peptide
HQNPVPKQSL

SEQ ID NO: 3165 - protein, 8 aa, Artificial Sequence
  Description of Artificial Sequence: Synthetic peptide
MHADIISL

SEQ ID NO: 3166 - protein, 8 aa, Artificial Sequence
  Description of Artificial Sequence: Synthetic peptide
QHTPTISL

SEQ ID NO: 3167 - protein, 11 aa, Artificial Sequence
  Description of Artificial Sequence: Synthetic peptide
SHVQSTNTNIM

SEQ ID NO: 3168 - protein, 9 aa, Artificial Sequence
  Description of Artificial Sequence: Synthetic peptide
GHQAAMQML

SEQ ID NO: 3169 - protein, 10 aa, Artificial Sequence
  Description of Artificial Sequence: Synthetic peptide
HQNPVSEQSL

SEQ ID NO: 3170 - protein, 9 aa, Artificial Sequence
  Description of Artificial Sequence: Synthetic peptide
NREPSTPAI

SEQ ID NO: 3171 - protein, 9 aa, Artificial Sequence
  Description of Artificial Sequence: Synthetic peptide
SQVQNTNIM

SEQ ID NO: 3172 - protein, 10 aa, Artificial Sequence
  Description of Artificial Sequence: Synthetic peptide
SHFPNATTII

SEQ ID NO: 3173 - protein, 9 aa, Artificial Sequence
  Description of Artificial Sequence: Synthetic peptide
IHTDNGPNF

SEQ ID NO: 3174 - protein, 10 aa, Artificial Sequence
  Description of Artificial Sequence: Synthetic peptide
HQNPIPKQSL

SEQ ID NO: 3175 - protein, 9 aa, Artificial Sequence
  Description of Artificial Sequence: Synthetic peptide
THSYNFPQI

SEQ ID NO: 3176 - protein, 10 aa, Artificial Sequence
  Description of Artificial Sequence: Synthetic peptide
SHVQSTNTNI

SEQ ID NO: 3177 - protein, 10 aa, Artificial Sequence
  Description of Artificial Sequence: Synthetic peptide
VHQAVSPRTL

SEQ ID NO: 3178 - protein, 8 aa, Artificial Sequence
  Description of Artificial Sequence: Synthetic peptide
THLEGKVI

SEQ ID NO: 3179 - protein, 9 aa, Artificial Sequence
  Description of Artificial Sequence: Synthetic peptide
TIAVAVAEW

SEQ ID NO: 3180 - protein, 9 aa, Artificial Sequence
  Description of Artificial Sequence: Synthetic peptide
TVLDVGDAY

SEQ ID NO: 3181 - protein, 9 aa, Artificial Sequence
  Description of Artificial Sequence: Synthetic peptide
TINEEAAEW

SEQ ID NO: 3182 - protein, 9 aa, Artificial Sequence
  Description of Artificial Sequence: Synthetic peptide
SAISLFDTI

SEQ ID NO: 3183 - protein, 9 aa, Artificial Sequence
  Description of Artificial Sequence: Synthetic peptide
TTVPWNTSW

SEQ ID NO: 3184 - protein, 8 aa, Artificial Sequence
  Description of Artificial Sequence: Synthetic peptide
TELIIYQY

SEQ ID NO: 3185 - protein, 8 aa, Artificial Sequence
  Description of Artificial Sequence: Synthetic peptide
NETPGVRY

SEQ ID NO: 3186 - protein, 9 aa, Artificial Sequence
  Description of Artificial Sequence: Synthetic peptide
TEAVQKITM

SEQ ID NO: 3187 - protein, 9 aa, Artificial Sequence
  Description of Artificial Sequence: Synthetic peptide
TEAVQKIVM

SEQ ID NO: 3188 - protein, 11 aa, Artificial Sequence
  Description of Artificial Sequence: Synthetic peptide
SEVNIVTDSQY

SEQ ID NO: 3189 - protein, 8 aa, Artificial Sequence
  Description of Artificial Sequence: Synthetic peptide
LEITTHSF

SEQ ID NO: 3190 - protein, 8 aa, Artificial Sequence
  Description of Artificial Sequence: Synthetic peptide
NETPGIRY

SEQ ID NO: 3191 - protein, 11 aa, Artificial Sequence
  Description of Artificial Sequence: Synthetic peptide
LEVNIVTDSQY

SEQ ID NO: 3192 - protein, 9 aa, Artificial Sequence
  Description of Artificial Sequence: Synthetic peptide
QELETREPY

SEQ ID NO: 3193 - protein, 9 aa, Artificial Sequence
  Description of Artificial Sequence: Synthetic peptide
TEEIKNCSY

SEQ ID NO: 3194 - protein, 8 aa, Artificial Sequence
  Description of Artificial Sequence: Synthetic peptide
EEIKNCSY

SEQ ID NO: 3195 - protein, 9 aa, Artificial Sequence
  Description of Artificial Sequence: Synthetic peptide
DEVGFPVRP

SEQ ID NO: 3196 - protein, 8 aa, Artificial Sequence
  Description of Artificial Sequence: Synthetic peptide
PEIIIYQY

SEQ ID NO: 3197 - protein, 8 aa, Artificial Sequence
  Description of Artificial Sequence: Synthetic peptide
LENVTENF

SEQ ID NO: 3198 - protein, 8 aa, Artificial Sequence
  Description of Artificial Sequence: Synthetic peptide
PEMVIYQY

SEQ ID NO: 3199 - protein, 8 aa, Artificial Sequence
  Description of Artificial Sequence: Synthetic peptide
TEELKSLY

SEQ ID NO: 3200 - protein, 8 aa, Artificial Sequence
  Description of Artificial Sequence: Synthetic peptide
DESLLQAI

SEQ ID NO: 3201 - protein, 8 aa, Artificial Sequence
  Description of Artificial Sequence: Synthetic peptide
DEDLIRAI

SEQ ID NO: 3202 - protein, 8 aa, Artificial Sequence
  Description of Artificial Sequence: Synthetic peptide
LEEEQNKY

SEQ ID NO: 3203 - protein, 8 aa, Artificial Sequence
  Description of Artificial Sequence: Synthetic peptide
DEDLLKAV

SEQ ID NO: 3204 - protein, 9 aa, Artificial Sequence
  Description of Artificial Sequence: Synthetic peptide
ARVLAVERY

SEQ ID NO: 3205 - protein, 11 aa, Artificial Sequence
  Description of Artificial Sequence: Synthetic peptide
SALPVGTEELK

SEQ ID NO: 3206 - protein, 10 aa, Artificial Sequence
  Description of Artificial Sequence: Synthetic peptide
VRQGYSPLSF

SEQ ID NO: 3207 - protein, 9 aa, Artificial Sequence
  Description of Artificial Sequence: Synthetic peptide
ILGELVSPK

SEQ ID NO: 3208 - protein, 11 aa, Artificial Sequence
  Description of Artificial Sequence: Synthetic peptide
KEAELELEENR

SEQ ID NO: 3209 - protein, 11 aa, Artificial Sequence
  Description of Artificial Sequence: Synthetic peptide
DVVQLDESENK

SEQ ID NO: 3210 - protein, 10 aa, Artificial Sequence
  Description of Artificial Sequence: Synthetic peptide
VRQGYSPVSF

SEQ ID NO: 3211 - protein, 9 aa, Artificial Sequence
  Description of Artificial Sequence: Synthetic peptide
ARVLAIERY

SEQ ID NO: 3212 - protein, 10 aa, Artificial Sequence
  Description of Artificial Sequence: Synthetic peptide
VQNTNIMIQR

SEQ ID NO: 3213 - protein, 11 aa, Artificial Sequence
  Description of Artificial Sequence: Synthetic peptide
GIVQQQSNLLK

SEQ ID NO: 3214 - protein, 9 aa, Artificial Sequence
  Description of Artificial Sequence: Synthetic peptide
QRTELHAIY

SEQ ID NO: 3215 - protein, 10 aa, Artificial Sequence
  Description of Artificial Sequence: Synthetic peptide
IRFGPGQAFY

SEQ ID NO: 3216 - protein, 10 aa, Artificial Sequence
  Description of Artificial Sequence: Synthetic peptide
GAVDLSHFLK

SEQ ID NO: 3217 - protein, 11 aa, Artificial Sequence
  Description of Artificial Sequence: Synthetic peptide
GGLDGLIYSQK

SEQ ID NO: 3218 - protein, 11 aa, Artificial Sequence
  Description of Artificial Sequence: Synthetic peptide
KALTDIVTLTK

SEQ ID NO: 3219 - protein, 9 aa, Artificial Sequence
  Description of Artificial Sequence: Synthetic peptide
IRFGPGQAF

SEQ ID NO: 3220 - protein, 10 aa, Artificial Sequence
  Description of Artificial Sequence: Synthetic peptide
YELDVVLLNR

SEQ ID NO: 3221 - protein, 9 aa, Artificial Sequence
  Description of Artificial Sequence: Synthetic peptide
YRGSSSQNY

SEQ ID NO: 3222 - protein, 10 aa, Artificial Sequence
  Description of Artificial Sequence: Synthetic peptide
GAFDLSHFLK

SEQ ID NO: 3223 - protein, 10 aa, Artificial Sequence
  Description of Artificial Sequence: Synthetic peptide
YQSNPYPTPR

SEQ ID NO: 3224 - protein, 11 aa, Artificial Sequence
  Description of Artificial Sequence: Synthetic peptide
KALTDIVPLTR

SEQ ID NO: 3225 - protein, 8 aa, Artificial Sequence
  Description of Artificial Sequence: Synthetic peptide
ARIIVRTY

SEQ ID NO: 3226 - protein, 9 aa, Artificial Sequence
  Description of Artificial Sequence: Synthetic peptide
RRTPPTAQR

SEQ ID NO: 3227 - protein, 9 aa, Artificial Sequence
  Description of Artificial Sequence: Synthetic peptide
ARIVELVGH

SEQ ID NO: 3228 - protein, 9 aa, Artificial Sequence
  Description of Artificial Sequence: Synthetic peptide
ARVLAVERY

SEQ ID NO: 3229 - protein, 9 aa, Artificial Sequence
  Description of Artificial Sequence: Synthetic peptide
ARTVTLLGH

SEQ ID NO: 3230 - protein, 10 aa, Artificial Sequence
  Description of Artificial Sequence: Synthetic peptide
IRFGPGQAFY

SEQ ID NO: 3231 - protein, 9 aa, Artificial Sequence
  Description of Artificial Sequence: Synthetic peptide
ARVLAIERY

SEQ ID NO: 3232 - protein, 9 aa, Artificial Sequence
  Description of Artificial Sequence: Synthetic peptide
QRTELHAIY

SEQ ID NO: 3233 - protein, 10 aa, Artificial Sequence
  Description of Artificial Sequence: Synthetic peptide
VRQGYSPVSF

SEQ ID NO: 3234 - protein, 9 aa, Artificial Sequence
  Description of Artificial Sequence: Synthetic peptide
IRFGPGQAF

SEQ ID NO: 3235 - protein, 9 aa, Artificial Sequence
  Description of Artificial Sequence: Synthetic peptide
EPIAGAETF

SEQ ID NO: 3236 - protein, 11 aa, Artificial Sequence
  Description of Artificial Sequence: Synthetic peptide
IPAETGQETAY

SEQ ID NO: 3237 - protein, 9 aa, Artificial Sequence
  Description of Artificial Sequence: Synthetic peptide
EPIVGAETF

SEQ ID NO: 3238 - protein, 9 aa, Artificial Sequence
  Description of Artificial Sequence: Synthetic peptide
NPEIIIYQY

SEQ ID NO: 3239 - protein, 9 aa, Artificial Sequence
  Description of Artificial Sequence: Synthetic peptide
NPEMVIYQY

SEQ ID NO: 3240 - protein, 11 aa, Artificial Sequence
  Description of Artificial Sequence: Synthetic peptide
IPTETGQDTAY

SEQ ID NO: 3241 - protein, 9 aa, Artificial Sequence
  Description of Artificial Sequence: Synthetic peptide
FPNATTIIF

SEQ ID NO: 3242 - protein, 9 aa, Artificial Sequence
  Description of Artificial Sequence: Synthetic peptide
TVLDVGDAY

SEQ ID NO: 3243 - protein, 8 aa, Artificial Sequence
  Description of Artificial Sequence: Synthetic peptide
TPGPGIRY

SEQ ID NO: 3244 - protein, 9 aa, Artificial Sequence
  Description of Artificial Sequence: Synthetic peptide
NAKNIIVQF

SEQ ID NO: 3245 - protein, 9 aa, Artificial Sequence
  Description of Artificial Sequence: Synthetic peptide
PPIPVGEIY

SEQ ID NO: 3246 - protein, 9 aa, Artificial Sequence
  Description of Artificial Sequence: Synthetic peptide
EPYNPAISL

SEQ ID NO: 3247 - protein, 8 aa, Artificial Sequence
  Description of Artificial Sequence: Synthetic peptide
LPVGTEEL

SEQ ID NO: 3248 - protein, 9 aa, Artificial Sequence
  Description of Artificial Sequence: Synthetic peptide
EGVEVIIRY

SEQ ID NO: 3249 - protein, 10 aa, Artificial Sequence
  Description of Artificial Sequence: Synthetic peptide
NPPIPVGEIY

SEQ ID NO: 3250 - protein, 10 aa, Artificial Sequence
  Description of Artificial Sequence: Synthetic peptide
TAATNPDCAW

SEQ ID NO: 3251 - protein, 9 aa, Artificial Sequence
  Description of Artificial Sequence: Synthetic peptide
SPAIFQSSM

SEQ ID NO: 3252 - protein, 9 aa, Artificial Sequence
  Description of Artificial Sequence: Synthetic peptide
DAYFSVPLY

SEQ ID NO: 3253 - protein, 10 aa, Artificial Sequence
  Description of Artificial Sequence: Synthetic peptide
TAANNPDCAW

SEQ ID NO: 3254 - protein, 8 aa, Artificial Sequence
  Description of Artificial Sequence: Synthetic peptide
VPLRAMTY

SEQ ID NO: 3255 - protein, 8 aa, Artificial Sequence
  Description of Artificial Sequence: Synthetic peptide
DPVHGVYY

SEQ ID NO: 3256 - protein, 10 aa, Artificial Sequence
  Description of Artificial Sequence: Synthetic peptide
EPIAGAETFY

SEQ ID NO: 3257 - protein, 8 aa, Artificial Sequence
  Description of Artificial Sequence: Synthetic peptide
TPVHGVYY

SEQ ID NO: 3258 - protein, 8 aa, Artificial Sequence
  Description of Artificial Sequence: Synthetic peptide
NPVHGVYY

SEQ ID NO: 3259 - protein, 9 aa, Artificial Sequence
  Description of Artificial Sequence: Synthetic peptide
SAEPVPLQL

SEQ ID NO: 3260 - protein, 9 aa, Artificial Sequence
  Description of Artificial Sequence: Synthetic peptide
FPISPIETV

SEQ ID NO: 3261 - protein, 9 aa, Artificial Sequence
  Description of Artificial Sequence: Synthetic peptide
QPDSSESEL

SEQ ID NO: 3262 - protein, 9 aa, Artificial Sequence
  Description of Artificial Sequence: Synthetic peptide
QPDRSESEL

SEQ ID NO: 3263 - protein, 9 aa, Artificial Sequence
  Description of Artificial Sequence: Synthetic peptide
DPNPQEVNL

SEQ ID NO: 3264 - protein, 9 aa, Artificial Sequence
  Description of Artificial Sequence: Synthetic peptide
SAEPVPLQL

SEQ ID NO: 3265 - protein, 9 aa, Artificial Sequence
  Description of Artificial Sequence: Synthetic peptide
YSTQIDPDL

SEQ ID NO: 3266 - protein, 9 aa, Artificial Sequence
  Description of Artificial Sequence: Synthetic peptide
DPNPQEVDL

SEQ ID NO: 3267 - protein, 9 aa, Artificial Sequence
  Description of Artificial Sequence: Synthetic peptide
DPNPQEINL

SEQ ID NO: 3268 - protein, 9 aa, Artificial Sequence
  Description of Artificial Sequence: Synthetic peptide
EPIAGAETF

SEQ ID NO: 3269 - protein, 8 aa, Artificial Sequence
  Description of Artificial Sequence: Synthetic peptide
NVTEDFNM

SEQ ID NO: 3270 - protein, 8 aa, Artificial Sequence
  Description of Artificial Sequence: Synthetic peptide
LPVGTEEL

SEQ ID NO: 3271 - protein, 9 aa, Artificial Sequence
  Description of Artificial Sequence: Synthetic peptide
VPLTREAEL

SEQ ID NO: 3272 - protein, 9 aa, Artificial Sequence
  Description of Artificial Sequence: Synthetic peptide
FPISPIETV

SEQ ID NO: 3273 - protein, 9 aa, Artificial Sequence
  Description of Artificial Sequence: Synthetic peptide
DPNPQEVNL

SEQ ID NO: 3274 - protein, 9 aa, Artificial Sequence
  Description of Artificial Sequence: Synthetic peptide
FPISPIETV

SEQ ID NO: 3275 - protein, 9 aa, Artificial Sequence
  Description of Artificial Sequence: Synthetic peptide
EPYNPAISL

SEQ ID NO: 3276 - protein, 9 aa, Artificial Sequence
  Description of Artificial Sequence: Synthetic peptide
QAIEAQQHL

SEQ ID NO: 3277 - protein, 9 aa, Artificial Sequence
  Description of Artificial Sequence: Synthetic peptide
EPIAGAETF

SEQ ID NO: 3278 - protein, 8 aa, Artificial Sequence
  Description of Artificial Sequence: Synthetic peptide
LPVGTEEL

SEQ ID NO: 3279 - protein, 9 aa, Artificial Sequence
  Description of Artificial Sequence: Synthetic peptide
SAEPVPLQL

SEQ ID NO: 3280 - protein, 9 aa, Artificial Sequence
  Description of Artificial Sequence: Synthetic peptide
FPNATTIIF

SEQ ID NO: 3281 - protein, 9 aa, Artificial Sequence
  Description of Artificial Sequence: Synthetic peptide
EPSTPAISL

SEQ ID NO: 3282 - protein, 9 aa, Artificial Sequence
  Description of Artificial Sequence: Synthetic peptide
VPLTREAEL

SEQ ID NO: 3283 - protein, 9 aa, Artificial Sequence
  Description of Artificial Sequence: Synthetic peptide
YSTQIDPDL

SEQ ID NO: 3284 - protein, 9 aa, Artificial Sequence
  Description of Artificial Sequence: Synthetic peptide
DPNPQEVDL

SEQ ID NO: 3285 - protein, 9 aa, Artificial Sequence
  Description of Artificial Sequence: Synthetic peptide
DPNPQEINL

SEQ ID NO: 3286 - protein, 9 aa, Artificial Sequence
  Description of Artificial Sequence: Synthetic peptide
TPQDLNTML

SEQ ID NO: 3287 - protein, 9 aa, Artificial Sequence
  Description of Artificial Sequence: Synthetic peptide
IPTPNPEGL

SEQ ID NO: 3288 - protein, 9 aa, Artificial Sequence
  Description of Artificial Sequence: Synthetic peptide
IVTDSQYAL

SEQ ID NO: 3289 - protein, 10 aa, Artificial Sequence
  Description of Artificial Sequence: Synthetic peptide
SPIETVPVKL

SEQ ID NO: 3290 - protein, 9 aa, Artificial Sequence
  Description of Artificial Sequence: Synthetic peptide
EPIVGAETF

SEQ ID NO: 3291 - protein, 9 aa, Artificial Sequence
  Description of Artificial Sequence: Synthetic peptide
QPDSSESEL

SEQ ID NO: 3292 - protein, 10 aa, Artificial Sequence
  Description of Artificial Sequence: Synthetic peptide
SALPVGTEEL

SEQ ID NO: 3293 - protein, 10 aa, Artificial Sequence
  Description of Artificial Sequence: Synthetic peptide
NANPDCKTIL

SEQ ID NO: 3294 - protein, 9 aa, Artificial Sequence
  Description of Artificial Sequence: Synthetic peptide
SLFGNDPLL

SEQ ID NO: 3295 - protein, 9 aa, Artificial Sequence
  Description of Artificial Sequence: Synthetic peptide
YHTQIDPDL

SEQ ID NO: 3296 - protein, 11 aa, Artificial Sequence
  Description of Artificial Sequence: Synthetic peptide
LPVGTEELKSL

SEQ ID NO: 3297 - protein, 10 aa, Artificial Sequence
  Description of Artificial Sequence: Synthetic peptide
QAIEAQQHLL

SEQ ID NO: 3298 - protein, 9 aa, Artificial Sequence
  Description of Artificial Sequence: Synthetic peptide
SPSGGDLEI

SEQ ID NO: 3299 - protein, 11 aa, Artificial Sequence
  Description of Artificial Sequence: Synthetic peptide
IPAETGQETAY

SEQ ID NO: 3300 - protein, 11 aa, Artificial Sequence
  Description of Artificial Sequence: Synthetic peptide
IPTETGQDTAY

SEQ ID NO: 3301 - protein, 9 aa, Artificial Sequence
  Description of Artificial Sequence: Synthetic peptide
EPIAGAETF

SEQ ID NO: 3302 - protein, 9 aa, Artificial Sequence
  Description of Artificial Sequence: Synthetic peptide
EPIVGAETF

SEQ ID NO: 3303 - protein, 9 aa, Artificial Sequence
  Description of Artificial Sequence: Synthetic peptide
NPEIIIYQY

SEQ ID NO: 3304 - protein, 9 aa, Artificial Sequence
  Description of Artificial Sequence: Synthetic peptide
NPEMVIYQY

SEQ ID NO: 3305 - protein, 9 aa, Artificial Sequence
  Description of Artificial Sequence: Synthetic peptide
QPDSSESEL

SEQ ID NO: 3306 - protein, 9 aa, Artificial Sequence
  Description of Artificial Sequence: Synthetic peptide
TVLDVGDAY

SEQ ID NO: 3307 - protein, 10 aa, Artificial Sequence
  Description of Artificial Sequence: Synthetic peptide
NPPIPVGEIY

SEQ ID NO: 3308 - protein, 9 aa, Artificial Sequence
  Description of Artificial Sequence: Synthetic peptide
FPNATTIIF

SEQ ID NO: 3309 - protein, 8 aa, Artificial Sequence
  Description of Artificial Sequence: Synthetic peptide
TPGPGIRY

SEQ ID NO: 3310 - protein, 9 aa, Artificial Sequence
  Description of Artificial Sequence: Synthetic peptide
QPDSSESEL

SEQ ID NO: 3311 - protein, 9 aa, Artificial Sequence
  Description of Artificial Sequence: Synthetic peptide
DPNPQEVNL

SEQ ID NO: 3312 - protein, 9 aa, Artificial Sequence
  Description of Artificial Sequence: Synthetic peptide
QPDRSESEL

SEQ ID NO: 3313 - protein, 9 aa, Artificial Sequence
  Description of Artificial Sequence: Synthetic peptide
VPLTREAEL

SEQ ID NO: 3314 - protein, 9 aa, Artificial Sequence
  Description of Artificial Sequence: Synthetic peptide
DPNPQEVDL

SEQ ID NO: 3315 - protein, 9 aa, Artificial Sequence
  Description of Artificial Sequence: Synthetic peptide
DPNPQEINL

SEQ ID NO: 3316 - protein, 9 aa, Artificial Sequence
  Description of Artificial Sequence: Synthetic peptide
SAEPVPLQL

SEQ ID NO: 3317 - protein, 9 aa, Artificial Sequence
  Description of Artificial Sequence: Synthetic peptide
EPIAGAETF

SEQ ID NO: 3318 - protein, 8 aa, Artificial Sequence
  Description of Artificial Sequence: Synthetic peptide
LPVGTEEL

SEQ ID NO: 3319 - protein, 9 aa, Artificial Sequence
  Description of Artificial Sequence: Synthetic peptide
YSTQIDPDL

SEQ ID NO: 3320 - protein, 8 aa, Artificial Sequence
  Description of Artificial Sequence: Synthetic peptide
NVTEDFNM

SEQ ID NO: 3321 - protein, 9 aa, Artificial Sequence
  Description of Artificial Sequence: Synthetic peptide
FPISPIETV

SEQ ID NO: 3322 - protein, 8 aa, Artificial Sequence
  Description of Artificial Sequence: Synthetic peptide
DPDLADHL

SEQ ID NO: 3323 - protein, 9 aa, Artificial Sequence
  Description of Artificial Sequence: Synthetic peptide
IPTPNPEGL

SEQ ID NO: 3324 - protein, 9 aa, Artificial Sequence
  Description of Artificial Sequence: Synthetic peptide
QAIEAQQHL

SEQ ID NO: 3325 - protein, 9 aa, Artificial Sequence
  Description of Artificial Sequence: Synthetic peptide
VDDPEREVL

SEQ ID NO: 3326 - protein, 9 aa, Artificial Sequence
  Description of Artificial Sequence: Synthetic peptide
EPIVGAETF

SEQ ID NO: 3327 - protein, 9 aa, Artificial Sequence
  Description of Artificial Sequence: Synthetic peptide
AEWDRVHPV

SEQ ID NO: 3328 - protein, 9 aa, Artificial Sequence
  Description of Artificial Sequence: Synthetic peptide
QDLARHGAV

SEQ ID NO: 3329 - protein, 8 aa, Artificial Sequence
  Description of Artificial Sequence: Synthetic peptide
VDAIAVTV

SEQ ID NO: 3330 - protein, 9 aa, Artificial Sequence
  Description of Artificial Sequence: Synthetic peptide
TEAVQKITM

SEQ ID NO: 3331 - protein, 8 aa, Artificial Sequence
  Description of Artificial Sequence: Synthetic peptide
IDSISERV

SEQ ID NO: 3332 - protein, 8 aa, Artificial Sequence
  Description of Artificial Sequence: Synthetic peptide
RDAETTLF

SEQ ID NO: 3333 - protein, 8 aa, Artificial Sequence
  Description of Artificial Sequence: Synthetic peptide
YDTEVHNV

SEQ ID NO: 3334 - protein, 8 aa, Artificial Sequence
  Description of Artificial Sequence: Synthetic peptide
NDSSSETF

SEQ ID NO: 3335 - protein, 8 aa, Artificial Sequence
  Description of Artificial Sequence: Synthetic peptide
AEHLKTAV

SEQ ID NO: 3336 - protein, 8 aa, Artificial Sequence
  Description of Artificial Sequence: Synthetic peptide
LENVTENF

SEQ ID NO: 3337 - protein, 8 aa, Artificial Sequence
  Description of Artificial Sequence: Synthetic peptide
FDTIAVAV

SEQ ID NO: 3338 - protein, 9 aa, Artificial Sequence
  Description of Artificial Sequence: Synthetic peptide
TEAVQKIVM

SEQ ID NO: 3339 - protein, 9 aa, Artificial Sequence
  Description of Artificial Sequence: Synthetic peptide
YHTQIDPDL

SEQ ID NO: 3340 - protein, 9 aa, Artificial Sequence
  Description of Artificial Sequence: Synthetic peptide
THTNDIKQL

SEQ ID NO: 3341 - protein, 9 aa, Artificial Sequence
  Description of Artificial Sequence: Synthetic peptide
TQSPINEEI

SEQ ID NO: 3342 - protein, 9 aa, Artificial Sequence
  Description of Artificial Sequence: Synthetic peptide
SHFPNATTI

SEQ ID NO: 3343 - protein, 9 aa, Artificial Sequence
  Description of Artificial Sequence: Synthetic peptide
THTNDVKQL

SEQ ID NO: 3344 - protein, 9 aa, Artificial Sequence
  Description of Artificial Sequence: Synthetic peptide
IHTDNGPNF

SEQ ID NO: 3345 - protein, 10 aa, Artificial Sequence
  Description of Artificial Sequence: Synthetic peptide
HQNPVSEQSL

SEQ ID NO: 3346 - protein, 10 aa, Artificial Sequence
  Description of Artificial Sequence: Synthetic peptide
SHVQSTNTNI

SEQ ID NO: 3347 - protein, 11 aa, Artificial Sequence
  Description of Artificial Sequence: Synthetic peptide
DHQNPVSEQSL

SEQ ID NO: 3348 - protein, 9 aa, Artificial Sequence
  Description of Artificial Sequence: Synthetic peptide
IHSTNQNVM

SEQ ID NO: 3349 - protein, 9 aa, Artificial Sequence
  Description of Artificial Sequence: Synthetic peptide
THLEGKVIL

SEQ ID NO: 3350 - protein, 9 aa, Artificial Sequence
  Description of Artificial Sequence: Synthetic peptide
EHFPNKTII

SEQ ID NO: 3351 - protein, 9 aa, Artificial Sequence
  Description of Artificial Sequence: Synthetic peptide
NREPSTPAI

SEQ ID NO: 3352 - protein, 9 aa, Artificial Sequence
  Description of Artificial Sequence: Synthetic peptide
TREPYNPAI

SEQ ID NO: 3353 - protein, 9 aa, Artificial Sequence
  Description of Artificial Sequence: Synthetic peptide
THSYNFPQI

SEQ ID NO: 3354 - protein, 11 aa, Artificial Sequence
  Description of Artificial Sequence: Synthetic peptide
EQEPIVGAETF

SEQ ID NO: 3355 - protein, 11 aa, Artificial Sequence
  Description of Artificial Sequence: Synthetic peptide
TQIDPDLADHL

SEQ ID NO: 3356 - protein, 9 aa, Artificial Sequence
  Description of Artificial Sequence: Synthetic peptide
TQDFWEVQL

SEQ ID NO: 3357 - protein, 10 aa, Artificial Sequence
  Description of Artificial Sequence: Synthetic peptide
IHTDNGPNFI

SEQ ID NO: 3358 - protein, 11 aa, Artificial Sequence
  Description of Artificial Sequence: Synthetic peptide
SHVQSTNTNIM

SEQ ID NO: 3359 - protein, 10 aa, Artificial Sequence
  Description of Artificial Sequence: Synthetic peptide
HQNPVPKQSL

SEQ ID NO: 3360 - protein, 9 aa, Artificial Sequence
  Description of Artificial Sequence: Synthetic peptide
GHQAAMQML

SEQ ID NO: 3361 - protein, 9 aa, Artificial Sequence
  Description of Artificial Sequence: Synthetic peptide
EHLKTAVQM

SEQ ID NO: 3362 - protein, 9 aa, Artificial Sequence
  Description of Artificial Sequence: Synthetic peptide
QDSGLEVNI

SEQ ID NO: 3363 - protein, 9 aa, Artificial Sequence
  Description of Artificial Sequence: Synthetic peptide
ERYLQDQQL

SEQ ID NO: 3364 - protein, 10 aa, Artificial Sequence
  Description of Artificial Sequence: Synthetic peptide
IHSTNQNVMM

SEQ ID NO: 3365 - protein, 10 aa, Artificial Sequence
  Description of Artificial Sequence: Synthetic peptide
QIDSISERVL

SEQ ID NO: 3366 - protein, 9 aa, Artificial Sequence
  Description of Artificial Sequence: Synthetic peptide
SLFGNDPLL

SEQ ID NO: 3367 - protein, 10 aa, Artificial Sequence
  Description of Artificial Sequence: Synthetic peptide
HQISVESSVI

SEQ ID NO: 3368 - protein, 9 aa, Artificial Sequence
  Description of Artificial Sequence: Synthetic peptide
NREPSTPAI

SEQ ID NO: 3369 - protein, 9 aa, Artificial Sequence
  Description of Artificial Sequence: Synthetic peptide
SHFPNATTI

SEQ ID NO: 3370 - protein, 9 aa, Artificial Sequence
  Description of Artificial Sequence: Synthetic peptide
YHTQIDPDL

SEQ ID NO: 3371 - protein, 9 aa, Artificial Sequence
  Description of Artificial Sequence: Synthetic peptide
TREPYNPAI

SEQ ID NO: 3372 - protein, 11 aa, Artificial Sequence
  Description of Artificial Sequence: Synthetic peptide
DHQNPVSEQSL

SEQ ID NO: 3373 - protein, 9 aa, Artificial Sequence
  Description of Artificial Sequence: Synthetic peptide
THTNDIKQL

SEQ ID NO: 3374 - protein, 9 aa, Artificial Sequence
  Description of Artificial Sequence: Synthetic peptide
IHSTNQNVM

SEQ ID NO: 3375 - protein, 9 aa, Artificial Sequence
  Description of Artificial Sequence: Synthetic peptide
EQHTPTISL

SEQ ID NO: 3376 - protein, 9 aa, Artificial Sequence
  Description of Artificial Sequence: Synthetic peptide
THTNDVKQL

SEQ ID NO: 3377 - protein, 9 aa, Artificial Sequence
  Description of Artificial Sequence: Synthetic peptide
ERYLQDQQL

SEQ ID NO: 3378 - protein, 10 aa, Artificial Sequence
  Description of Artificial Sequence: Synthetic peptide
HQNPVSEQSL

SEQ ID NO: 3379 - protein, 9 aa, Artificial Sequence
  Description of Artificial Sequence: Synthetic peptide
SQVQNTNIM

SEQ ID NO: 3380 - protein, 9 aa, Artificial Sequence
  Description of Artificial Sequence: Synthetic peptide
THLEGKVIL

SEQ ID NO: 3381 - protein, 9 aa, Artificial Sequence
  Description of Artificial Sequence: Synthetic peptide
EHLKTAVQM

SEQ ID NO: 3382 - protein, 9 aa, Artificial Sequence
  Description of Artificial Sequence: Synthetic peptide
EHFPNKTII

SEQ ID NO: 3383 - protein, 9 aa, Artificial Sequence
  Description of Artificial Sequence: Synthetic peptide
TQSPINEEI

SEQ ID NO: 3384 - protein, 10 aa, Artificial Sequence
  Description of Artificial Sequence: Synthetic peptide
HQNPVPKQSL

SEQ ID NO: 3385 - protein, 11 aa, Artificial Sequence
  Description of Artificial Sequence: Synthetic peptide
TQIDPDLADHL

SEQ ID NO: 3386 - protein, 8 aa, Artificial Sequence
  Description of Artificial Sequence: Synthetic peptide
MHADIISL

SEQ ID NO: 3387 - protein, 9 aa, Artificial Sequence
  Description of Artificial Sequence: Synthetic peptide
IHTDNGPNF

SEQ ID NO: 3388 - protein, 9 aa, Artificial Sequence
  Description of Artificial Sequence: Synthetic peptide
HQAVSPRTL

SEQ ID NO: 3389 - protein, 8 aa, Artificial Sequence
  Description of Artificial Sequence: Synthetic peptide
QHTPTISL

SEQ ID NO: 3390 - protein, 9 aa, Artificial Sequence
  Description of Artificial Sequence: Synthetic peptide
HQAISPRTL

SEQ ID NO: 3391 - protein, 11 aa, Artificial Sequence
  Description of Artificial Sequence: Synthetic peptide
NREPSTPAISL

SEQ ID NO: 3392 - protein, 8 aa, Artificial Sequence
  Description of Artificial Sequence: Synthetic peptide
THGIKPVA

SEQ ID NO: 3393 - protein, 8 aa, Artificial Sequence
  Description of Artificial Sequence: Synthetic peptide
DQIVIEIC

SEQ ID NO: 3394 - protein, 8 aa, Artificial Sequence
  Description of Artificial Sequence: Synthetic peptide
VHIPLKEA

SEQ ID NO: 3395 - protein, 10 aa, Artificial Sequence
  Description of Artificial Sequence: Synthetic peptide
SQYALGIIQA

SEQ ID NO: 3396 - protein, 8 aa, Artificial Sequence
  Description of Artificial Sequence: Synthetic peptide
AHGIRPVA

SEQ ID NO: 3397 - protein, 9 aa, Artificial Sequence
  Description of Artificial Sequence: Synthetic peptide
SHFPNATTI

SEQ ID NO: 3398 - protein, 9 aa, Artificial Sequence
  Description of Artificial Sequence: Synthetic peptide
VQLGIPHPA

SEQ ID NO: 3399 - protein, 8 aa, Artificial Sequence
  Description of Artificial Sequence: Synthetic peptide
GQMVHQAV

SEQ ID NO: 3400 - protein, 8 aa, Artificial Sequence
  Description of Artificial Sequence: Synthetic peptide
THGIRPVV

SEQ ID NO: 3401 - protein, 8 aa, Artificial Sequence
  Description of Artificial Sequence: Synthetic peptide
GKIIVVAV

SEQ ID NO: 3402 - protein, 9 aa, Artificial Sequence
  Description of Artificial Sequence: Synthetic peptide
QQQLLKLTV

SEQ ID NO: 3403 - protein, 9 aa, Artificial Sequence
  Description of Artificial Sequence: Synthetic peptide
QNYPIVQNA

SEQ ID NO: 3404 - protein, 8 aa, Artificial Sequence
  Description of Artificial Sequence: Synthetic peptide
VHIPLGEA

SEQ ID NO: 3405 - protein, 8 aa, Artificial Sequence
  Description of Artificial Sequence: Synthetic peptide
DQIAIEIC

SEQ ID NO: 3406 - protein, 9 aa, Artificial Sequence
  Description of Artificial Sequence: Synthetic peptide
EHFPNKTII

SEQ ID NO: 3407 - protein, 9 aa, Artificial Sequence
  Description of Artificial Sequence: Synthetic peptide
DNGPNFISA

SEQ ID NO: 3408 - protein, 9 aa, Artificial Sequence
  Description of Artificial Sequence: Synthetic peptide
YQLETEPIA

SEQ ID NO: 3409 - protein, 8 aa, Artificial Sequence
  Description of Artificial Sequence: Synthetic peptide
WQRPLVTV

SEQ ID NO: 3410 - protein, 8 aa, Artificial Sequence
  Description of Artificial Sequence: Synthetic peptide
DQSLMPCV

SEQ ID NO: 3411 - protein, 9 aa, Artificial Sequence
  Description of Artificial Sequence: Synthetic peptide
YQLEKEPIA

SEQ ID NO: 3412 - protein, 9 aa, Artificial Sequence
  Description of Artificial Sequence: Synthetic peptide
DNGPNFTSA

SEQ ID NO: 3413 - protein, 9 aa, Artificial Sequence
  Description of Artificial Sequence: Synthetic peptide
EQVDKLVSC

SEQ ID NO: 3414 - protein, 8 aa, Artificial Sequence
  Description of Artificial Sequence: Synthetic peptide
SHFPNATT

SEQ ID NO: 3415 - protein, 9 aa, Artificial Sequence
  Description of Artificial Sequence: Synthetic peptide
TREPYNPAI

SEQ ID NO: 3416 - protein, 9 aa, Artificial Sequence
  Description of Artificial Sequence: Synthetic peptide
THGIKPVAS

SEQ ID NO: 3417 - protein, 8 aa, Artificial Sequence
  Description of Artificial Sequence: Synthetic peptide
GKVILVAV

SEQ ID NO: 3418 - protein, 11 aa, Artificial Sequence
  Description of Artificial Sequence: Synthetic peptide
THLEGKIIVVA

SEQ ID NO: 3419 - protein, 9 aa, Artificial Sequence
  Description of Artificial Sequence: Synthetic peptide
THLEGKIIV

SEQ ID NO: 3420 - protein, 9 aa, Artificial Sequence
  Description of Artificial Sequence: Synthetic peptide
SNLLQAIEA

SEQ ID NO: 3421 - protein, 9 aa, Artificial Sequence
  Description of Artificial Sequence: Synthetic peptide
GRDSFLVEA

SEQ ID NO: 3422 - protein, 8 aa, Artificial Sequence
  Description of Artificial Sequence: Synthetic peptide
DRLHPVQA

SEQ ID NO: 3423 - protein, 9 aa, Artificial Sequence
  Description of Artificial Sequence: Synthetic peptide
GAVTIRNTA

SEQ ID NO: 3424 - protein, 9 aa, Artificial Sequence
  Description of Artificial Sequence: Synthetic peptide
TESNDTITL

SEQ ID NO: 3425 - protein, 9 aa, Artificial Sequence
  Description of Artificial Sequence: Synthetic peptide
AEDPEREVL

SEQ ID NO: 3426 - protein, 9 aa, Artificial Sequence
  Description of Artificial Sequence: Synthetic peptide
RESNDNITL

SEQ ID NO: 3427 - protein, 10 aa, Artificial Sequence
  Description of Artificial Sequence: Synthetic peptide
IEVKDTKEAL

SEQ ID NO: 3428 - protein, 10 aa, Artificial Sequence
  Description of Artificial Sequence: Synthetic peptide
TETTNQKTEL

SEQ ID NO: 3429 - protein, 9 aa, Artificial Sequence
  Description of Artificial Sequence: Synthetic peptide
TEAVQKITM

SEQ ID NO: 3430 - protein, 9 aa, Artificial Sequence
  Description of Artificial Sequence: Synthetic peptide
TEAVQKIVM

SEQ ID NO: 3431 - protein, 10 aa, Artificial Sequence
  Description of Artificial Sequence: Synthetic peptide
TETTNQRTEL

SEQ ID NO: 3432 - protein, 11 aa, Artificial Sequence
  Description of Artificial Sequence: Synthetic peptide
EEIASSSKQEL

SEQ ID NO: 3433 - protein, 10 aa, Artificial Sequence
  Description of Artificial Sequence: Synthetic peptide
REPSTPAISL

SEQ ID NO: 3434 - protein, 10 aa, Artificial Sequence
  Description of Artificial Sequence: Synthetic peptide
AEGTDRVIEL

SEQ ID NO: 3435 - protein, 9 aa, Artificial Sequence
  Description of Artificial Sequence: Synthetic peptide
VELVGHSSL

SEQ ID NO: 3436 - protein, 10 aa, Artificial Sequence
  Description of Artificial Sequence: Synthetic peptide
TETGVGGHQI

SEQ ID NO: 3437 - protein, 11 aa, Artificial Sequence
  Description of Artificial Sequence: Synthetic peptide
GEQDRDTSVRL

SEQ ID NO: 3438 - protein, 9 aa, Artificial Sequence
  Description of Artificial Sequence: Synthetic peptide
IEGQLKEAL

SEQ ID NO: 3439 - protein, 11 aa, Artificial Sequence
  Description of Artificial Sequence: Synthetic peptide
SERESNDNITL

SEQ ID NO: 3440 - protein, 9 aa, Artificial Sequence
  Description of Artificial Sequence: Synthetic peptide
MEEEITSSL

SEQ ID NO: 3441 - protein, 10 aa, Artificial Sequence
  Description of Artificial Sequence: Synthetic peptide
REPYNPAISL

SEQ ID NO: 3442 - protein, 10 aa, Artificial Sequence
  Description of Artificial Sequence: Synthetic peptide
SEDCGTSGTL

SEQ ID NO: 3443 - protein, 9 aa, Artificial Sequence
  Description of Artificial Sequence: Synthetic peptide
SEGATPQDL

SEQ ID NO: 3444 - protein, 10 aa, Artificial Sequence
  Description of Artificial Sequence: Synthetic peptide
REQHTPTISL

SEQ ID NO: 3445 - protein, 8 aa, Artificial Sequence
  Description of Artificial Sequence: Synthetic peptide
IETVPVKL

SEQ ID NO: 3446 - protein, 9 aa, Artificial Sequence
  Description of Artificial Sequence: Synthetic peptide
QEKNEQDVL

SEQ ID NO: 3447 - protein, 10 aa, Artificial Sequence
  Description of Artificial Sequence: Synthetic peptide
KEISNYTETI

SEQ ID NO: 3448 - protein, 9 aa, Artificial Sequence
  Description of Artificial Sequence: Synthetic peptide
IEGQLREAL

SEQ ID NO: 3449 - protein, 11 aa, Artificial Sequence
  Description of Artificial Sequence: Synthetic peptide
EEITSSLKQEL

SEQ ID NO: 3450 - protein, 9 aa, Artificial Sequence
  Description of Artificial Sequence: Synthetic peptide
QEKNEQDLL

SEQ ID NO: 3451 - protein, 8 aa, Artificial Sequence
  Description of Artificial Sequence: Synthetic peptide
GEEITSSL

SEQ ID NO: 3452 - protein, 10 aa, Artificial Sequence
  Description of Artificial Sequence: Synthetic peptide
QESVESSVIL

SEQ ID NO: 3453 - protein, 9 aa, Artificial Sequence
  Description of Artificial Sequence: Synthetic peptide
SESEIVNQI

SEQ ID NO: 3454 - protein, 10 aa, Artificial Sequence
  Description of Artificial Sequence: Synthetic peptide
AEHLKTAVQM

SEQ ID NO: 3455 - protein, 9 aa, Artificial Sequence
  Description of Artificial Sequence: Synthetic peptide
TEGENNSLL

SEQ ID NO: 3456 - protein, 11 aa, Artificial Sequence
  Description of Artificial Sequence: Synthetic peptide
SEIVNQIIEKL

SEQ ID NO: 3457 - protein, 8 aa, Artificial Sequence
  Description of Artificial Sequence: Synthetic peptide
IEAQQHLL

SEQ ID NO: 3458 - protein, 9 aa, Artificial Sequence
  Description of Artificial Sequence: Synthetic peptide
KEISTYTDI

SEQ ID NO: 3459 - protein, 9 aa, Artificial Sequence
  Description of Artificial Sequence: Synthetic peptide
TEAVQKITM

SEQ ID NO: 3460 - protein, 9 aa, Artificial Sequence
  Description of Artificial Sequence: Synthetic peptide
TEAVQKIVM

SEQ ID NO: 3461 - protein, 9 aa, Artificial Sequence
  Description of Artificial Sequence: Synthetic peptide
TESNDTITL

SEQ ID NO: 3462 - protein, 9 aa, Artificial Sequence
  Description of Artificial Sequence: Synthetic peptide
AEDPEREVL

SEQ ID NO: 3463 - protein, 11 aa, Artificial Sequence
  Description of Artificial Sequence: Synthetic peptide
EEIASSSKQEL

SEQ ID NO: 3464 - protein, 11 aa, Artificial Sequence
  Description of Artificial Sequence: Synthetic peptide
SERESNDNITL

SEQ ID NO: 3465 - protein, 10 aa, Artificial Sequence
  Description of Artificial Sequence: Synthetic peptide
TETTNQRTEL

SEQ ID NO: 3466 - protein, 10 aa, Artificial Sequence
  Description of Artificial Sequence: Synthetic peptide
TETTNQKTEL

SEQ ID NO: 3467 - protein, 9 aa, Artificial Sequence
  Description of Artificial Sequence: Synthetic peptide
VELVGHSSL

SEQ ID NO: 3468 - protein, 10 aa, Artificial Sequence
  Description of Artificial Sequence: Synthetic peptide
AEGTDRVIEL

SEQ ID NO: 3469 - protein, 10 aa, Artificial Sequence
  Description of Artificial Sequence: Synthetic peptide
TETGVGGHQI

SEQ ID NO: 3470 - protein, 8 aa, Artificial Sequence
  Description of Artificial Sequence: Synthetic peptide
TDIQTKEL

SEQ ID NO: 3471 - protein, 10 aa, Artificial Sequence
  Description of Artificial Sequence: Synthetic peptide
AEHLKTAVQM

SEQ ID NO: 3472 - protein, 11 aa, Artificial Sequence
  Description of Artificial Sequence: Synthetic peptide
EEITSSLKQEL

SEQ ID NO: 3473 - protein, 10 aa, Artificial Sequence
  Description of Artificial Sequence: Synthetic peptide
IEVKDTKEAL

SEQ ID NO: 3474 - protein, 11 aa, Artificial Sequence
  Description of Artificial Sequence: Synthetic peptide
SEIVNQIIEKL

SEQ ID NO: 3475 - protein, 9 aa, Artificial Sequence
  Description of Artificial Sequence: Synthetic peptide
IEGQLKEAL

SEQ ID NO: 3476 - protein, 10 aa, Artificial Sequence
  Description of Artificial Sequence: Synthetic peptide
REPSTPAISL

SEQ ID NO: 3477 - protein, 11 aa, Artificial Sequence
  Description of Artificial Sequence: Synthetic peptide
GEQDRDTSVRL

SEQ ID NO: 3478 - protein, 8 aa, Artificial Sequence
  Description of Artificial Sequence: Synthetic peptide
IETVPVKL

SEQ ID NO: 3479 - protein, 9 aa, Artificial Sequence
  Description of Artificial Sequence: Synthetic peptide
SESEIVNQI

SEQ ID NO: 3480 - protein, 9 aa, Artificial Sequence
  Description of Artificial Sequence: Synthetic peptide
AEWDRVHPV

SEQ ID NO: 3481 - protein, 8 aa, Artificial Sequence
  Description of Artificial Sequence: Synthetic peptide
IEAQQQML

SEQ ID NO: 3482 - protein, 10 aa, Artificial Sequence
  Description of Artificial Sequence: Synthetic peptide
REPYNPAISL

SEQ ID NO: 3483 - protein, 9 aa, Artificial Sequence
  Description of Artificial Sequence: Synthetic peptide
RESNDNITL

SEQ ID NO: 3484 - protein, 9 aa, Artificial Sequence
  Description of Artificial Sequence: Synthetic peptide
IEGQLREAL

SEQ ID NO: 3485 - protein, 10 aa, Artificial Sequence
  Description of Artificial Sequence: Synthetic peptide
REQHTPTISL

SEQ ID NO: 3486 - protein, 8 aa, Artificial Sequence
  Description of Artificial Sequence: Synthetic peptide
VDAIAVTV

SEQ ID NO: 3487 - protein, 10 aa, Artificial Sequence
  Description of Artificial Sequence: Synthetic peptide
KEISNYTETI

SEQ ID NO: 3488 - protein, 8 aa, Artificial Sequence
  Description of Artificial Sequence: Synthetic peptide
IEAQQHLL

SEQ ID NO: 3489 - protein, 9 aa, Artificial Sequence
  Description of Artificial Sequence: Synthetic peptide
SERILSTCL

SEQ ID NO: 3490 - protein, 8 aa, Artificial Sequence
  Description of Artificial Sequence: Synthetic peptide
FDTIAVAV

SEQ ID NO: 3491 - protein, 9 aa, Artificial Sequence
  Description of Artificial Sequence: Synthetic peptide
QEKNEQDVL

SEQ ID NO: 3492 - protein, 9 aa, Artificial Sequence
  Description of Artificial Sequence: Synthetic peptide
SEGATPQDL

SEQ ID NO: 3493 - protein, 9 aa, Artificial Sequence
  Description of Artificial Sequence: Synthetic peptide
AEVIPTETG

SEQ ID NO: 3494 - protein, 11 aa, Artificial Sequence
  Description of Artificial Sequence: Synthetic peptide
SEVKDNTTKEM

SEQ ID NO: 3495 - protein, 10 aa, Artificial Sequence
  Description of Artificial Sequence: Synthetic peptide
AETGVGRPQT

SEQ ID NO: 3496 - protein, 9 aa, Artificial Sequence
  Description of Artificial Sequence: Synthetic peptide
SESELVNQI

SEQ ID NO: 3497 - protein, 9 aa, Artificial Sequence
  Description of Artificial Sequence: Synthetic peptide
LDFGDVNNV

SEQ ID NO: 3498 - protein, 9 aa, Artificial Sequence
  Description of Artificial Sequence: Synthetic peptide
SEVGFPVRP

SEQ ID NO: 3499 - protein, 9 aa, Artificial Sequence
  Description of Artificial Sequence: Synthetic peptide
LETEPIAGA

SEQ ID NO: 3500 - protein, 11 aa, Artificial Sequence
  Description of Artificial Sequence: Synthetic peptide
AEWDRLHPVQA

SEQ ID NO: 3501 - protein, 9 aa, Artificial Sequence
  Description of Artificial Sequence: Synthetic peptide
GEQGAVHPC

SEQ ID NO: 3502 - protein, 9 aa, Artificial Sequence
  Description of Artificial Sequence: Synthetic peptide
LEQEPIVGA

SEQ ID NO: 3503 - protein, 9 aa, Artificial Sequence
  Description of Artificial Sequence: Synthetic peptide
LEKEPIAGA

SEQ ID NO: 3504 - protein, 10 aa, Artificial Sequence
  Description of Artificial Sequence: Synthetic peptide
NEIIGDIRQA

SEQ ID NO: 3505 - protein, 9 aa, Artificial Sequence
  Description of Artificial Sequence: Synthetic peptide
EEVGFPVRP

SEQ ID NO: 3506 - protein, 10 aa, Artificial Sequence
  Description of Artificial Sequence: Synthetic peptide
REFSSEQDRA

SEQ ID NO: 3507 - protein, 10 aa, Artificial Sequence
  Description of Artificial Sequence: Synthetic peptide
SEVHIPLGEA

SEQ ID NO: 3508 - protein, 9 aa, Artificial Sequence
  Description of Artificial Sequence: Synthetic peptide
IEVKDTKEA

SEQ ID NO: 3509 - protein, 8 aa, Artificial Sequence
  Description of Artificial Sequence: Synthetic peptide
AEGVRPTP

SEQ ID NO: 3510 - protein, 9 aa, Artificial Sequence
  Description of Artificial Sequence: Synthetic peptide
QEFGIPYNP

SEQ ID NO: 3511 - protein, 9 aa, Artificial Sequence
  Description of Artificial Sequence: Synthetic peptide
AEWDRVHPV

SEQ ID NO: 3512 - protein, 8 aa, Artificial Sequence
  Description of Artificial Sequence: Synthetic peptide
TEAVSPAA

SEQ ID NO: 3513 - protein, 9 aa, Artificial Sequence
  Description of Artificial Sequence: Synthetic peptide
GENNSLLHP

SEQ ID NO: 3514 - protein, 8 aa, Artificial Sequence
  Description of Artificial Sequence: Synthetic peptide
SESAIRKA

SEQ ID NO: 3515 - protein, 9 aa, Artificial Sequence
  Description of Artificial Sequence: Synthetic peptide
AEGVRPTPP

SEQ ID NO: 3516 - protein, 8 aa, Artificial Sequence
  Description of Artificial Sequence: Synthetic peptide
AETTLFCA

SEQ ID NO: 3517 - protein, 10 aa, Artificial Sequence
  Description of Artificial Sequence: Synthetic peptide
SEVHIPLKEA

SEQ ID NO: 3518 - protein, 9 aa, Artificial Sequence
  Description of Artificial Sequence: Synthetic peptide
AEDPEREVL

SEQ ID NO: 3519 - protein, 9 aa, Artificial Sequence
  Description of Artificial Sequence: Synthetic peptide
TEAVQKIVM

SEQ ID NO: 3520 - protein, 9 aa, Artificial Sequence
  Description of Artificial Sequence: Synthetic peptide
TEAVQKITM

SEQ ID NO: 3521 - protein, 11 aa, Artificial Sequence
  Description of Artificial Sequence: Synthetic peptide
SERESNDNITL

SEQ ID NO: 3522 - protein, 9 aa, Artificial Sequence
  Description of Artificial Sequence: Synthetic peptide
QEKNEQDVL

SEQ ID NO: 3523 - protein, 10 aa, Artificial Sequence
  Description of Artificial Sequence: Synthetic peptide
TETTNQRTEL

SEQ ID NO: 3524 - protein, 8 aa, Artificial Sequence
  Description of Artificial Sequence: Synthetic peptide
TDIQTKEL

SEQ ID NO: 3525 - protein, 9 aa, Artificial Sequence
  Description of Artificial Sequence: Synthetic peptide
SERILSTCL

SEQ ID NO: 3526 - protein, 9 aa, Artificial Sequence
  Description of Artificial Sequence: Synthetic peptide
TESNDTITL

SEQ ID NO: 3527 - protein, 8 aa, Artificial Sequence
  Description of Artificial Sequence: Synthetic peptide
AEHLKTAV

SEQ ID NO: 3528 - protein, 9 aa, Artificial Sequence
  Description of Artificial Sequence: Synthetic peptide
VELVGHSSL

SEQ ID NO: 3529 - protein, 11 aa, Artificial Sequence
  Description of Artificial Sequence: Synthetic peptide
EEIASSSKQEL

SEQ ID NO: 3530 - protein, 9 aa, Artificial Sequence
  Description of Artificial Sequence: Synthetic peptide
RESNDNITL

SEQ ID NO: 3531 - protein, 9 aa, Artificial Sequence
  Description of Artificial Sequence: Synthetic peptide
SESAIRKAI

SEQ ID NO: 3532 - protein, 9 aa, Artificial Sequence
  Description of Artificial Sequence: Synthetic peptide
IEGQLREAL

SEQ ID NO: 3533 - protein, 9 aa, Artificial Sequence
  Description of Artificial Sequence: Synthetic peptide
IEGQLKEAL

SEQ ID NO: 3534 - protein, 9 aa, Artificial Sequence
  Description of Artificial Sequence: Synthetic peptide
GEQDRDTSV

SEQ ID NO: 3535 - protein, 10 aa, Artificial Sequence
  Description of Artificial Sequence: Synthetic peptide
AEGTDRVIEL

SEQ ID NO: 3536 - protein, 8 aa, Artificial Sequence
  Description of Artificial Sequence: Synthetic peptide
IEAQQQML

SEQ ID NO: 3537 - protein, 10 aa, Artificial Sequence
  Description of Artificial Sequence: Synthetic peptide
TETTNQKTEL

SEQ ID NO: 3538 - protein, 10 aa, Artificial Sequence
  Description of Artificial Sequence: Synthetic peptide
REQHTPTISL

SEQ ID NO: 3539 - protein, 8 aa, Artificial Sequence
  Description of Artificial Sequence: Synthetic peptide
IEAQQHLL

SEQ ID NO: 3540 - protein, 9 aa, Artificial Sequence
  Description of Artificial Sequence: Synthetic peptide
QEKNEQDLL

SEQ ID NO: 3541 - protein, 11 aa, Artificial Sequence
  Description of Artificial Sequence: Synthetic peptide
GEQDRDTSVRL

SEQ ID NO: 3542 - protein, 9 aa, Artificial Sequence
  Description of Artificial Sequence: Synthetic peptide
SESAIRRAI

SEQ ID NO: 3543 - protein, 11 aa, Artificial Sequence
  Description of Artificial Sequence: Synthetic peptide
EEITSSLKQEL

SEQ ID NO: 3544 - protein, 10 aa, Artificial Sequence
  Description of Artificial Sequence: Synthetic peptide
AEHLKTAVQM

SEQ ID NO: 3545 - protein, 8 aa, Artificial Sequence
  Description of Artificial Sequence: Synthetic peptide
TERQANFL

SEQ ID NO: 3546 - protein, 10 aa, Artificial Sequence
  Description of Artificial Sequence: Synthetic peptide
REPSTPAISL

SEQ ID NO: 3547 - protein, 9 aa, Artificial Sequence
  Description of Artificial Sequence: Synthetic peptide
KEKGGLDGL

SEQ ID NO: 3548 - protein, 8 aa, Artificial Sequence
  Description of Artificial Sequence: Synthetic peptide
GDPEITTL

SEQ ID NO: 3549 - protein, 8 aa, Artificial Sequence
  Description of Artificial Sequence: Synthetic peptide
TEAVQKIV

SEQ ID NO: 3550 - protein, 8 aa, Artificial Sequence
  Description of Artificial Sequence: Synthetic peptide
IEAQQQLL

SEQ ID NO: 3551 - protein, 8 aa, Artificial Sequence
  Description of Artificial Sequence: Synthetic peptide
GEEITSSL

SEQ ID NO: 3552 - protein, 8 aa, Artificial Sequence
  Description of Artificial Sequence: Synthetic peptide
VEAIVRIL

SEQ ID NO: 3553 - protein, 9 aa, Artificial Sequence
  Description of Artificial Sequence: Synthetic peptide
SERVLRTCL

SEQ ID NO: 3554 - protein, 9 aa, Artificial Sequence
  Description of Artificial Sequence: Synthetic peptide
AEWDRVHPV

SEQ ID NO: 3555 - protein, 11 aa, Artificial Sequence
  Description of Artificial Sequence: Synthetic peptide
AEQATQDVKNW

SEQ ID NO: 3556 - protein, 11 aa, Artificial Sequence
  Description of Artificial Sequence: Synthetic peptide
AEQATQEVKNW

SEQ ID NO: 3557 - protein, 9 aa, Artificial Sequence
  Description of Artificial Sequence: Synthetic peptide
EEINLPGKW

SEQ ID NO: 3558 - protein, 11 aa, Artificial Sequence
  Description of Artificial Sequence: Synthetic peptide
SEVNIVTDSQY

SEQ ID NO: 3559 - protein, 10 aa, Artificial Sequence
  Description of Artificial Sequence: Synthetic peptide
TEKQGTTHSY

SEQ ID NO: 3560 - protein, 11 aa, Artificial Sequence
  Description of Artificial Sequence: Synthetic peptide
AEIQKQGQDQW

SEQ ID NO: 3561 - protein, 11 aa, Artificial Sequence
  Description of Artificial Sequence: Synthetic peptide
EEIASSSKQEL

SEQ ID NO: 3562 - protein, 11 aa, Artificial Sequence
  Description of Artificial Sequence: Synthetic peptide
AEDPEREVLKW

SEQ ID NO: 3563 - protein, 9 aa, Artificial Sequence
  Description of Artificial Sequence: Synthetic peptide
SESAIRKAI

SEQ ID NO: 3564 - protein, 11 aa, Artificial Sequence
  Description of Artificial Sequence: Synthetic peptide
AEIQKQGQGQW

SEQ ID NO: 3565 - protein, 11 aa, Artificial Sequence
  Description of Artificial Sequence: Synthetic peptide
NEQDVLALDKW

SEQ ID NO: 3566 - protein, 11 aa, Artificial Sequence
  Description of Artificial Sequence: Synthetic peptide
EEITSSLKQEL

SEQ ID NO: 3567 - protein, 11 aa, Artificial Sequence
  Description of Artificial Sequence: Synthetic peptide
NEQDLLALDKW

SEQ ID NO: 3568 - protein, 9 aa, Artificial Sequence
  Description of Artificial Sequence: Synthetic peptide
QELETREPY

SEQ ID NO: 3569 - protein, 10 aa, Artificial Sequence
  Description of Artificial Sequence: Synthetic peptide
NETPGVRYQY

SEQ ID NO: 3570 - protein, 9 aa, Artificial Sequence
  Description of Artificial Sequence: Synthetic peptide
SESEIVNQI

SEQ ID NO: 3571 - protein, 10 aa, Artificial Sequence
  Description of Artificial Sequence: Synthetic peptide
GEARIIVRTY

SEQ ID NO: 3572 - protein, 10 aa, Artificial Sequence
  Description of Artificial Sequence: Synthetic peptide
NETPGIRYQY

SEQ ID NO: 3573 - protein, 9 aa, Artificial Sequence
  Description of Artificial Sequence: Synthetic peptide
AETGQETAY

SEQ ID NO: 3574 - protein, 9 aa, Artificial Sequence
  Description of Artificial Sequence: Synthetic peptide
SESAIRRAI

SEQ ID NO: 3575 - protein, 10 aa, Artificial Sequence
  Description of Artificial Sequence: Synthetic peptide
GEARLIVRTY

SEQ ID NO: 3576 - protein, 11 aa, Artificial Sequence
  Description of Artificial Sequence: Synthetic peptide
SEVNIVTDSQY

SEQ ID NO: 3577 - protein, 11 aa, Artificial Sequence
  Description of Artificial Sequence: Synthetic peptide
AEQATQDVKNW

SEQ ID NO: 3578 - protein, 9 aa, Artificial Sequence
  Description of Artificial Sequence: Synthetic peptide
EEINLPGKW

SEQ ID NO: 3579 - protein, 11 aa, Artificial Sequence
  Description of Artificial Sequence: Synthetic peptide
AEQATQEVKNW

SEQ ID NO: 3580 - protein, 11 aa, Artificial Sequence
  Description of Artificial Sequence: Synthetic peptide
AEIQKQGQDQW

SEQ ID NO: 3581 - protein, 9 aa, Artificial Sequence
  Description of Artificial Sequence: Synthetic peptide
SESAIRKAI

SEQ ID NO: 3582 - protein, 11 aa, Artificial Sequence
  Description of Artificial Sequence: Synthetic peptide
AEIQKQGQGQW

SEQ ID NO: 3583 - protein, 9 aa, Artificial Sequence
  Description of Artificial Sequence: Synthetic peptide
SESEIVNQI

SEQ ID NO: 3584 - protein, 11 aa, Artificial Sequence
  Description of Artificial Sequence: Synthetic peptide
EEIASSSKQEL

SEQ ID NO: 3585 - protein, 11 aa, Artificial Sequence
  Description of Artificial Sequence: Synthetic peptide
AEDPEREVLKW

SEQ ID NO: 3586 - protein, 10 aa, Artificial Sequence
  Description of Artificial Sequence: Synthetic peptide
TETGVGGHQI

SEQ ID NO: 3587 - protein, 11 aa, Artificial Sequence
  Description of Artificial Sequence: Synthetic peptide
NEQDVLALDKW

SEQ ID NO: 3588 - protein, 10 aa, Artificial Sequence
  Description of Artificial Sequence: Synthetic peptide
NETPGIRYQY

SEQ ID NO: 3589 - protein, 10 aa, Artificial Sequence
  Description of Artificial Sequence: Synthetic peptide
NETPGVRYQY

SEQ ID NO: 3590 - protein, 11 aa, Artificial Sequence
  Description of Artificial Sequence: Synthetic peptide
LEVNIVTDSQY

SEQ ID NO: 3591 - protein, 10 aa, Artificial Sequence
  Description of Artificial Sequence: Synthetic peptide
TEKQGTTHSY

SEQ ID NO: 3592 - protein, 11 aa, Artificial Sequence
  Description of Artificial Sequence: Synthetic peptide
NEQDLLALDKW

SEQ ID NO: 3593 - protein, 9 aa, Artificial Sequence
  Description of Artificial Sequence: Synthetic peptide
SESELVNQI

SEQ ID NO: 3594 - protein, 10 aa, Artificial Sequence
  Description of Artificial Sequence: Synthetic peptide
GEARIIVRTY

SEQ ID NO: 3595 - protein, 11 aa, Artificial Sequence
  Description of Artificial Sequence: Synthetic peptide
EEITSSLKQEL

SEQ ID NO: 3596 - protein, 9 aa, Artificial Sequence
  Description of Artificial Sequence: Synthetic peptide
QELETREPY

SEQ ID NO: 3597 - protein, 9 aa, Artificial Sequence
  Description of Artificial Sequence: Synthetic peptide
TEAVQKITM

SEQ ID NO: 3598 - protein, 10 aa, Artificial Sequence
  Description of Artificial Sequence: Synthetic peptide
QEPIVGAETF

SEQ ID NO: 3599 - protein, 10 aa, Artificial Sequence
  Description of Artificial Sequence: Synthetic peptide
GEARLIVRTY

SEQ ID NO: 3600 - protein, 9 aa, Artificial Sequence
  Description of Artificial Sequence: Synthetic peptide
AETGQETAY

SEQ ID NO: 3601 - protein, 10 aa, Artificial Sequence
  Description of Artificial Sequence: Synthetic peptide
EEVMIRSKNF

SEQ ID NO: 3602 - protein, 9 aa, Artificial Sequence
  Description of Artificial Sequence: Synthetic peptide
AEDPEREVL

SEQ ID NO: 3603 - protein, 9 aa, Artificial Sequence
  Description of Artificial Sequence: Synthetic peptide
SESAIRRAI

SEQ ID NO: 3604 - protein, 10 aa, Artificial Sequence
  Description of Artificial Sequence: Synthetic peptide
WENGTNKQNY

SEQ ID NO: 3605 - protein, 10 aa, Artificial Sequence
  Description of Artificial Sequence: Synthetic peptide
EEHEKYHSNW

SEQ ID NO: 3606 - protein, 8 aa, Artificial Sequence
  Description of Artificial Sequence: Synthetic peptide
NETPGVRY

SEQ ID NO: 3607 - protein, 10 aa, Artificial Sequence
  Description of Artificial Sequence: Synthetic peptide
AETGQETAYF

SEQ ID NO: 3608 - protein, 9 aa, Artificial Sequence
  Description of Artificial Sequence: Synthetic peptide
DEIWDNMTW

SEQ ID NO: 3609 - protein, 9 aa, Artificial Sequence
  Description of Artificial Sequence: Synthetic peptide
TEAVQKIVM

SEQ ID NO: 3610 - protein, 8 aa, Artificial Sequence
  Description of Artificial Sequence: Synthetic peptide
NETPGIRY

SEQ ID NO: 3611 - protein, 9 aa, Artificial Sequence
  Description of Artificial Sequence: Synthetic peptide
YDTEVHNVW

SEQ ID NO: 3612 - protein, 11 aa, Artificial Sequence
  Description of Artificial Sequence: Synthetic peptide
EEIASSSKQEL

SEQ ID NO: 3613 - protein, 11 aa, Artificial Sequence
  Description of Artificial Sequence: Synthetic peptide
AEIQKQGQDQW

SEQ ID NO: 3614 - protein, 11 aa, Artificial Sequence
  Description of Artificial Sequence: Synthetic peptide
EEITSSLKQEL

SEQ ID NO: 3615 - protein, 10 aa, Artificial Sequence
  Description of Artificial Sequence: Synthetic peptide
TETGVGGHQI

SEQ ID NO: 3616 - protein, 9 aa, Artificial Sequence
  Description of Artificial Sequence: Synthetic peptide
TEAVQKITM

SEQ ID NO: 3617 - protein, 9 aa, Artificial Sequence
  Description of Artificial Sequence: Synthetic peptide
AEDPEREVL

SEQ ID NO: 3618 - protein, 11 aa, Artificial Sequence
  Description of Artificial Sequence: Synthetic peptide
AEIQKQGQGQW

SEQ ID NO: 3619 - protein, 11 aa, Artificial Sequence
  Description of Artificial Sequence: Synthetic peptide
AEQATQEVKNW

SEQ ID NO: 3620 - protein, 11 aa, Artificial Sequence
  Description of Artificial Sequence: Synthetic peptide
AEQATQDVKNW

SEQ ID NO: 3621 - protein, 9 aa, Artificial Sequence
  Description of Artificial Sequence: Synthetic peptide
QEEESEVGF

SEQ ID NO: 3622 - protein, 11 aa, Artificial Sequence
  Description of Artificial Sequence: Synthetic peptide
GEQDRDTSVRL

SEQ ID NO: 3623 - protein, 9 aa, Artificial Sequence
  Description of Artificial Sequence: Synthetic peptide
TEAVQKIVM

SEQ ID NO: 3624 - protein, 10 aa, Artificial Sequence
  Description of Artificial Sequence: Synthetic peptide
TETTNQRTEL

SEQ ID NO: 3625 - protein, 11 aa, Artificial Sequence
  Description of Artificial Sequence: Synthetic peptide
SEVNIVTDSQY

SEQ ID NO: 3626 - protein, 10 aa, Artificial Sequence
  Description of Artificial Sequence: Synthetic peptide
AETGQETAYF

SEQ ID NO: 3627 - protein, 11 aa, Artificial Sequence
  Description of Artificial Sequence: Synthetic peptide
SEIVNQIIEKL

SEQ ID NO: 3628 - protein, 10 aa, Artificial Sequence
  Description of Artificial Sequence: Synthetic peptide
QEPIVGAETF

SEQ ID NO: 3629 - protein, 9 aa, Artificial Sequence
  Description of Artificial Sequence: Synthetic peptide
EEINLPGKW

SEQ ID NO: 3630 - protein, 10 aa, Artificial Sequence
  Description of Artificial Sequence: Synthetic peptide
TETTNQKTEL

SEQ ID NO: 3631 - protein, 9 aa, Artificial Sequence
  Description of Artificial Sequence: Synthetic peptide
SESEIVNQI

SEQ ID NO: 3632 - protein, 10 aa, Artificial Sequence
  Description of Artificial Sequence: Synthetic peptide
AEGTDRVIEL

SEQ ID NO: 3633 - protein, 9 aa, Artificial Sequence
  Description of Artificial Sequence: Synthetic peptide
TESNDTITL

SEQ ID NO: 3634 - protein, 11 aa, Artificial Sequence
  Description of Artificial Sequence: Synthetic peptide
SERESNDNITL

SEQ ID NO: 3635 - protein, 10 aa, Artificial Sequence
  Description of Artificial Sequence: Synthetic peptide
REQHTPTISL

SEQ ID NO: 3636 - protein, 10 aa, Artificial Sequence
  Description of Artificial Sequence: Synthetic peptide
KEPIAGAETF

SEQ ID NO: 3637 - protein, 11 aa, Artificial Sequence
  Description of Artificial Sequence: Synthetic peptide
GEQGAVHPCNF

SEQ ID NO: 3638 - protein, 10 aa, Artificial Sequence
  Description of Artificial Sequence: Synthetic peptide
VESKTETHQF

SEQ ID NO: 3639 - protein, 10 aa, Artificial Sequence
  Description of Artificial Sequence: Synthetic peptide
AEHLKTAVQM

SEQ ID NO: 3640 - protein, 10 aa, Artificial Sequence
  Description of Artificial Sequence: Synthetic peptide
EELKSLYNTI

SEQ ID NO: 3641 - protein, 9 aa, Artificial Sequence
  Description of Artificial Sequence: Synthetic peptide
SESELVNQI

SEQ ID NO: 3642 - protein, 11 aa, Artificial Sequence
  Description of Artificial Sequence: Synthetic peptide
NEQDVLALDKW

SEQ ID NO: 3643 - protein, 11 aa, Artificial Sequence
  Description of Artificial Sequence: Synthetic peptide
AEDPEREVLKW

SEQ ID NO: 3644 - protein, 10 aa, Artificial Sequence
  Description of Artificial Sequence: Synthetic peptide
TEPIAGAETF

SEQ ID NO: 3645 - protein, 9 aa, Artificial Sequence
  Description of Artificial Sequence: Synthetic peptide
SESAIRKAI

SEQ ID NO: 3646 - protein, 9 aa, Artificial Sequence
  Description of Artificial Sequence: Synthetic peptide
RESNDNITL

SEQ ID NO: 3647 - protein, 10 aa, Artificial Sequence
  Description of Artificial Sequence: Synthetic peptide
KEISNYTETI

SEQ ID NO: 3648 - protein, 11 aa, Artificial Sequence
  Description of Artificial Sequence: Synthetic peptide
AELELEENREI

SEQ ID NO: 3649 - protein, 9 aa, Artificial Sequence
  Description of Artificial Sequence: Synthetic peptide
VELVGHSSL

SEQ ID NO: 3650 - protein, 9 aa, Artificial Sequence
  Description of Artificial Sequence: Synthetic peptide
SEGATPQDL

SEQ ID NO: 3651 - protein, 10 aa, Artificial Sequence
  Description of Artificial Sequence: Synthetic peptide
REPSTPAISL

SEQ ID NO: 3652 - protein, 9 aa, Artificial Sequence
  Description of Artificial Sequence: Synthetic peptide
EELSKMVGM

SEQ ID NO: 3653 - protein, 11 aa, Artificial Sequence
  Description of Artificial Sequence: Synthetic peptide
SELVNQIIEKL

SEQ ID NO: 3654 - protein, 9 aa, Artificial Sequence
  Description of Artificial Sequence: Synthetic peptide
SESAIRRAI

SEQ ID NO: 3655 - protein, 10 aa, Artificial Sequence
  Description of Artificial Sequence: Synthetic peptide
SESEIVNQII

SEQ ID NO: 3656 - protein, 9 aa, Artificial Sequence
  Description of Artificial Sequence: Synthetic peptide
QEESDEVGF

SEQ ID NO: 3657 - protein, 9 aa, Artificial Sequence
  Description of Artificial Sequence: Synthetic peptide
QEKNEQDLL

SEQ ID NO: 3658 - protein, 11 aa, Artificial Sequence
  Description of Artificial Sequence: Synthetic peptide
EEATQGENNSL

SEQ ID NO: 3659 - protein, 10 aa, Artificial Sequence
  Description of Artificial Sequence: Synthetic peptide
AENVGMGEEI

SEQ ID NO: 3660 - protein, 11 aa, Artificial Sequence
  Description of Artificial Sequence: Synthetic peptide
AEGVGAVSQDL

SEQ ID NO: 3661 - protein, 10 aa, Artificial Sequence
  Description of Artificial Sequence: Synthetic peptide
QELKTSAIRL

SEQ ID NO: 3662 - protein, 10 aa, Artificial Sequence
  Description of Artificial Sequence: Synthetic peptide
TETGQDTAYF

SEQ ID NO: 3663 - protein, 9 aa, Artificial Sequence
  Description of Artificial Sequence: Synthetic peptide
QEKNEQDVL

SEQ ID NO: 3664 - protein, 11 aa, Artificial Sequence
  Description of Artificial Sequence: Synthetic peptide
QDLGTRGAVTI

SEQ ID NO: 3665 - protein, 10 aa, Artificial Sequence
  Description of Artificial Sequence: Synthetic peptide
REPYNPAISL

SEQ ID NO: 3666 - protein, 10 aa, Artificial Sequence
  Description of Artificial Sequence: Synthetic peptide
EELRSLYNTI

SEQ ID NO: 3667 - protein, 9 aa, Artificial Sequence
  Description of Artificial Sequence: Synthetic peptide
EQHTPTISL

SEQ ID NO: 3668 - protein, 9 aa, Artificial Sequence
  Description of Artificial Sequence: Synthetic peptide
TEGENNSLL

SEQ ID NO: 3669 - protein, 10 aa, Artificial Sequence
  Description of Artificial Sequence: Synthetic peptide
RELKNSAVNL

SEQ ID NO: 3670 - protein, 8 aa, Artificial Sequence
  Description of Artificial Sequence: Synthetic peptide
AEGGKIMI

SEQ ID NO: 3671 - protein, 11 aa, Artificial Sequence
  Description of Artificial Sequence: Synthetic peptide
LEVNIVTDSQY

SEQ ID NO: 3672 - protein, 11 aa, Artificial Sequence
  Description of Artificial Sequence: Synthetic peptide
SEVKDNTTKEM

SEQ ID NO: 3673 - protein, 10 aa, Artificial Sequence
  Description of Artificial Sequence: Synthetic peptide
IEAQQQLLKL

SEQ ID NO: 3674 - protein, 9 aa, Artificial Sequence
  Description of Artificial Sequence: Synthetic peptide
EELSTLVEM

SEQ ID NO: 3675 - protein, 9 aa, Artificial Sequence
  Description of Artificial Sequence: Synthetic peptide
INKGLGISY

SEQ ID NO: 3676 - protein, 9 aa, Artificial Sequence
  Description of Artificial Sequence: Synthetic peptide
FLVEAGTEK

SEQ ID NO: 3677 - protein, 10 aa, Artificial Sequence
  Description of Artificial Sequence: Synthetic peptide
SIRFGPGQAF

SEQ ID NO: 3678 - protein, 10 aa, Artificial Sequence
  Description of Artificial Sequence: Synthetic peptide
ILKDPVHGVY

SEQ ID NO: 3679 - protein, 10 aa, Artificial Sequence
  Description of Artificial Sequence: Synthetic peptide
FINKGLGISY

SEQ ID NO: 3680 - protein, 9 aa, Artificial Sequence
  Description of Artificial Sequence: Synthetic peptide
KAIEAQQQL

SEQ ID NO: 3681 - protein, 10 aa, Artificial Sequence
  Description of Artificial Sequence: Synthetic peptide
HQNPVSEQSL

SEQ ID NO: 3682 - protein, 9 aa, Artificial Sequence
  Description of Artificial Sequence: Synthetic peptide
KALTDIVTL

SEQ ID NO: 3683 - protein, 10 aa, Artificial Sequence
  Description of Artificial Sequence: Synthetic peptide
HQNPVPKQSL

SEQ ID NO: 3684 - protein, 10 aa, Artificial Sequence
  Description of Artificial Sequence: Synthetic peptide
HLDFGDVNNV

SEQ ID NO: 3685 - protein, 8 aa, Artificial Sequence
  Description of Artificial Sequence: Synthetic peptide
HQAAMQML

SEQ ID NO: 3686 - protein, 9 aa, Artificial Sequence
  Description of Artificial Sequence: Synthetic peptide
HQAISPRTL

SEQ ID NO: 3687 - protein, 9 aa, Artificial Sequence
  Description of Artificial Sequence: Synthetic peptide
EQHTPTISL

SEQ ID NO: 3688 - protein, 9 aa, Artificial Sequence
  Description of Artificial Sequence: Synthetic peptide
LDFGDVNNV

SEQ ID NO: 3689 - protein, 9 aa, Artificial Sequence
  Description of Artificial Sequence: Synthetic peptide
HQAVSPRTL

SEQ ID NO: 3690 - protein, 9 aa, Artificial Sequence
  Description of Artificial Sequence: Synthetic peptide
GKNSINETF

SEQ ID NO: 3691 - protein, 9 aa, Artificial Sequence
  Description of Artificial Sequence: Synthetic peptide
RALGPGASL

SEQ ID NO: 3692 - protein, 10 aa, Artificial Sequence
  Description of Artificial Sequence: Synthetic peptide
SLFGNDPLSQ

SEQ ID NO: 3693 - protein, 10 aa, Artificial Sequence
  Description of Artificial Sequence: Synthetic peptide
HQNPIPKQSL

SEQ ID NO: 3694 - protein, 8 aa, Artificial Sequence
  Description of Artificial Sequence: Synthetic peptide
KQLQARVL

SEQ ID NO: 3695 - protein, 9 aa, Artificial Sequence
  Description of Artificial Sequence: Synthetic peptide
RALGPGATL

SEQ ID NO: 3696 - protein, 9 aa, Artificial Sequence
  Description of Artificial Sequence: Synthetic peptide
SESEIVNQI

SEQ ID NO: 3697 - protein, 9 aa, Artificial Sequence
  Description of Artificial Sequence: Synthetic peptide
SESELVNQI

SEQ ID NO: 3698 - protein, 10 aa, Artificial Sequence
  Description of Artificial Sequence: Synthetic peptide
TETGVGGHQI

SEQ ID NO: 3699 - protein, 10 aa, Artificial Sequence
  Description of Artificial Sequence: Synthetic peptide
KEISNYTETI

SEQ ID NO: 3700 - protein, 9 aa, Artificial Sequence
  Description of Artificial Sequence: Synthetic peptide
KEISNYTNI

SEQ ID NO: 3701 - protein, 9 aa, Artificial Sequence
  Description of Artificial Sequence: Synthetic peptide
KEISTYTDI

SEQ ID NO: 3702 - protein, 11 aa, Artificial Sequence
  Description of Artificial Sequence: Synthetic peptide
VESSGILGSGI

SEQ ID NO: 3703 - protein, 9 aa, Artificial Sequence
  Description of Artificial Sequence: Synthetic peptide
QESVESSVI

SEQ ID NO: 3704 - protein, 9 aa, Artificial Sequence
  Description of Artificial Sequence: Synthetic peptide
AEWDRVHPV

SEQ ID NO: 3705 - protein, 10 aa, Artificial Sequence
  Description of Artificial Sequence: Synthetic peptide
CEYQAGHNKV

SEQ ID NO: 3706 - protein, 9 aa, Artificial Sequence
  Description of Artificial Sequence: Synthetic peptide
TESNDTITL

SEQ ID NO: 3707 - protein, 9 aa, Artificial Sequence
  Description of Artificial Sequence: Synthetic peptide
TEAVQKITM

SEQ ID NO: 3708 - protein, 8 aa, Artificial Sequence
  Description of Artificial Sequence: Synthetic peptide
QELKTSAI

SEQ ID NO: 3709 - protein, 9 aa, Artificial Sequence
  Description of Artificial Sequence: Synthetic peptide
AEVIPTETG

SEQ ID NO: 3710 - protein, 8 aa, Artificial Sequence
  Description of Artificial Sequence: Synthetic peptide
GEAIHGQV

SEQ ID NO: 3711 - protein, 8 aa, Artificial Sequence
  Description of Artificial Sequence: Synthetic peptide
SEIVNQII

SEQ ID NO: 3712 - protein, 10 aa, Artificial Sequence
  Description of Artificial Sequence: Synthetic peptide
KEISNYTNII

SEQ ID NO: 3713 - protein, 10 aa, Artificial Sequence
  Description of Artificial Sequence: Synthetic peptide
AENVGMGEEI

SEQ ID NO: 3714 - protein, 9 aa, Artificial Sequence
  Description of Artificial Sequence: Synthetic peptide
TEAVQKIVM

SEQ ID NO: 3715 - protein, 9 aa, Artificial Sequence
  Description of Artificial Sequence: Synthetic peptide
LELEENREI

SEQ ID NO: 3716 - protein, 9 aa, Artificial Sequence
  Description of Artificial Sequence: Synthetic peptide
MEEEITSSL

SEQ ID NO: 3717 - protein, 8 aa, Artificial Sequence
  Description of Artificial Sequence: Synthetic peptide
AEGGKIMI

SEQ ID NO: 3718 - protein, 9 aa, Artificial Sequence
  Description of Artificial Sequence: Synthetic peptide
SESAIRKAI

SEQ ID NO: 3719 - protein, 9 aa, Artificial Sequence
  Description of Artificial Sequence: Synthetic peptide
VEQMHADII

SEQ ID NO: 3720 - protein, 9 aa, Artificial Sequence
  Description of Artificial Sequence: Synthetic peptide
SEVGFPVRP

SEQ ID NO: 3721 - protein, 9 aa, Artificial Sequence
  Description of Artificial Sequence: Synthetic peptide
IEVKDTKEA

SEQ ID NO: 3722 - protein, 9 aa, Artificial Sequence
  Description of Artificial Sequence: Synthetic peptide
LETEPIAGA

SEQ ID NO: 3723 - protein, 9 aa, Artificial Sequence
  Description of Artificial Sequence: Synthetic peptide
LEKEPIAGA

SEQ ID NO: 3724 - protein, 9 aa, Artificial Sequence
  Description of Artificial Sequence: Synthetic peptide
AETFYVDGA

SEQ ID NO: 3725 - protein, 10 aa, Artificial Sequence
  Description of Artificial Sequence: Synthetic peptide
SEVHIPLGEA

SEQ ID NO: 3726 - protein, 9 aa, Artificial Sequence
  Description of Artificial Sequence: Synthetic peptide
AEGVRPTPP

SEQ ID NO: 3727 - protein, 10 aa, Artificial Sequence
  Description of Artificial Sequence: Synthetic peptide
SEVHIPLKEA

SEQ ID NO: 3728 - protein, 9 aa, Artificial Sequence
  Description of Artificial Sequence: Synthetic peptide
TVAEGTDRV

SEQ ID NO: 3729 - protein, 9 aa, Artificial Sequence
  Description of Artificial Sequence: Synthetic peptide
LEQEPIVGA

SEQ ID NO: 3730 - protein, 9 aa, Artificial Sequence
  Description of Artificial Sequence: Synthetic peptide
AVAEWTDRV

SEQ ID NO: 3731 - protein, 9 aa, Artificial Sequence
  Description of Artificial Sequence: Synthetic peptide
TEAVSPAAP

SEQ ID NO: 3732 - protein, 9 aa, Artificial Sequence
  Description of Artificial Sequence: Synthetic peptide
TQSPINEEI

SEQ ID NO: 3733 - protein, 9 aa, Artificial Sequence
  Description of Artificial Sequence: Synthetic peptide
ASITLTVQA

SEQ ID NO: 3734 - protein, 9 aa, Artificial Sequence
  Description of Artificial Sequence: Synthetic peptide
AAFLGFLGA

SEQ ID NO: 3735 - protein, 9 aa, Artificial Sequence
  Description of Artificial Sequence: Synthetic peptide
KIIGDIRQA

SEQ ID NO: 3736 - protein, 9 aa, Artificial Sequence
  Description of Artificial Sequence: Synthetic peptide
AVFLGFLGA

SEQ ID NO: 3737 - protein, 10 aa, Artificial Sequence
  Description of Artificial Sequence: Synthetic peptide
AETFYVDGAA

SEQ ID NO: 3738 - protein, 9 aa, Artificial Sequence
  Description of Artificial Sequence: Synthetic peptide
AETTLFCAS

SEQ ID NO: 3739 - protein, 9 aa, Artificial Sequence
  Description of Artificial Sequence: Synthetic peptide
ATLEEMMTA

SEQ ID NO: 3740 - protein, 9 aa, Artificial Sequence
  Description of Artificial Sequence: Synthetic peptide
EIIGDIRQA

SEQ ID NO: 3741 - protein, 9 aa, Artificial Sequence
  Description of Artificial Sequence: Synthetic peptide
YEDFRKYTA

SEQ ID NO: 3742 - protein, 9 aa, Artificial Sequence
  Description of Artificial Sequence: Synthetic peptide
AIITVVNRV

SEQ ID NO: 3743 - protein, 9 aa, Artificial Sequence
  Description of Artificial Sequence: Synthetic peptide
AEVIPTETG

SEQ ID NO: 3744 - protein, 9 aa, Artificial Sequence
  Description of Artificial Sequence: Synthetic peptide
KAIEAQQQL

SEQ ID NO: 3745 - protein, 10 aa, Artificial Sequence
  Description of Artificial Sequence: Synthetic peptide
RVIEIGQRAC

SEQ ID NO: 3746 - protein, 8 aa, Artificial Sequence
  Description of Artificial Sequence: Synthetic peptide
AETTLFCA

SEQ ID NO: 3747 - protein, 10 aa, Artificial Sequence
  Description of Artificial Sequence: Synthetic peptide
AVFLGFLGAA

SEQ ID NO: 3748 - protein, 11 aa, Artificial Sequence
  Description of Artificial Sequence: Synthetic peptide
RENLASQQREA

SEQ ID NO: 3749 - protein, 9 aa, Artificial Sequence
  Description of Artificial Sequence: Synthetic peptide
KEFNGKGSC

SEQ ID NO: 3750 - protein, 9 aa, Artificial Sequence
  Description of Artificial Sequence: Synthetic peptide
NIIGDIRQA

SEQ ID NO: 3751 - protein, 9 aa, Artificial Sequence
  Description of Artificial Sequence: Synthetic peptide
EEVGFPVRP

SEQ ID NO: 3752 - protein, 10 aa, Artificial Sequence
  Description of Artificial Sequence: Synthetic peptide
REFSSEQDRA

SEQ ID NO: 3753 - protein, 9 aa, Artificial Sequence
  Description of Artificial Sequence: Synthetic peptide
GEQGAVHPC

SEQ ID NO: 3754 - protein, 8 aa, Artificial Sequence
  Description of Artificial Sequence: Synthetic peptide
TEAVSPAA

SEQ ID NO: 3755 - protein, 11 aa, Artificial Sequence
  Description of Artificial Sequence: Synthetic peptide
AEWDRLHPVQA

SEQ ID NO: 3756 - protein, 8 aa, Artificial Sequence
  Description of Artificial Sequence: Synthetic peptide
TAFTIPSI

SEQ ID NO: 3757 - protein, 9 aa, Artificial Sequence
  Description of Artificial Sequence: Synthetic peptide
FPISPIETV

SEQ ID NO: 3758 - protein, 8 aa, Artificial Sequence
  Description of Artificial Sequence: Synthetic peptide
LPLAILSI

SEQ ID NO: 3759 - protein, 8 aa, Artificial Sequence
  Description of Artificial Sequence: Synthetic peptide
LPLVILAI

SEQ ID NO: 3760 - protein, 9 aa, Artificial Sequence
  Description of Artificial Sequence: Synthetic peptide
DAKAYDTEV

SEQ ID NO: 3761 - protein, 8 aa, Artificial Sequence
  Description of Artificial Sequence: Synthetic peptide
VPVEPSEV

SEQ ID NO: 3762 - protein, 8 aa, Artificial Sequence
  Description of Artificial Sequence: Synthetic peptide
VPVNPSEV

SEQ ID NO: 3763 - protein, 9 aa, Artificial Sequence
  Description of Artificial Sequence: Synthetic peptide
DPPIPVGEI

SEQ ID NO: 3764 - protein, 10 aa, Artificial Sequence
  Description of Artificial Sequence: Synthetic peptide
IPYNPQSQGV

SEQ ID NO: 3765 - protein, 8 aa, Artificial Sequence
  Description of Artificial Sequence: Synthetic peptide
YAPPIAGI

SEQ ID NO: 3766 - protein, 8 aa, Artificial Sequence
  Description of Artificial Sequence: Synthetic peptide
APPIAGVI

SEQ ID NO: 3767 - protein, 8 aa, Artificial Sequence
  Description of Artificial Sequence: Synthetic peptide
VPVDPSEV

SEQ ID NO: 3768 - protein, 9 aa, Artificial Sequence
  Description of Artificial Sequence: Synthetic peptide
LPLAILSIV

SEQ ID NO: 3769 - protein, 8 aa, Artificial Sequence
  Description of Artificial Sequence: Synthetic peptide
HSYNFPQI

SEQ ID NO: 3770 - protein, 8 aa, Artificial Sequence
  Description of Artificial Sequence: Synthetic peptide
YAPPIAGV

SEQ ID NO: 3771 - protein, 9 aa, Artificial Sequence
  Description of Artificial Sequence: Synthetic peptide
YAPPIAGVI

SEQ ID NO: 3772 - protein, 9 aa, Artificial Sequence
  Description of Artificial Sequence: Synthetic peptide
LPPVVAKEI

SEQ ID NO: 3773 - protein, 9 aa, Artificial Sequence
  Description of Artificial Sequence: Synthetic peptide
LPPIVAKEI

SEQ ID NO: 3774 - protein, 8 aa, Artificial Sequence
  Description of Artificial Sequence: Synthetic peptide
DSWTVNDI

SEQ ID NO: 3775 - protein, 9 aa, Artificial Sequence
  Description of Artificial Sequence: Synthetic peptide
IPLGEARII

SEQ ID NO: 3776 - protein, 8 aa, Artificial Sequence
  Description of Artificial Sequence: Synthetic peptide
SPLAILSI

SEQ ID NO: 3777 - protein, 8 aa, Artificial Sequence
  Description of Artificial Sequence: Synthetic peptide
NPYNTPVF

SEQ ID NO: 3778 - protein, 9 aa, Artificial Sequence
  Description of Artificial Sequence: Synthetic peptide
DAKAYDREV

SEQ ID NO: 3779 - protein, 9 aa, Artificial Sequence
  Description of Artificial Sequence: Synthetic peptide
IPLGEARLI

SEQ ID NO: 3780 - protein, 9 aa, Artificial Sequence
  Description of Artificial Sequence: Synthetic peptide
EPYNPAISL

SEQ ID NO: 3781 - protein, 8 aa, Artificial Sequence
  Description of Artificial Sequence: Synthetic peptide
TAYFILKL

SEQ ID NO: 3782 - protein, 9 aa, Artificial Sequence
  Description of Artificial Sequence: Synthetic peptide
NPPIPVGEI

SEQ ID NO: 3783 - protein, 9 aa, Artificial Sequence
  Description of Artificial Sequence: Synthetic peptide
YAPPIAGII

SEQ ID NO: 3784 - protein, 8 aa, Artificial Sequence
  Description of Artificial Sequence: Synthetic peptide
VGLVVASI

SEQ ID NO: 3785 - protein, 9 aa, Artificial Sequence
  Description of Artificial Sequence: Synthetic peptide
DAYFSVPLY

SEQ ID NO: 3786 - protein, 11 aa, Artificial Sequence
  Description of Artificial Sequence: Synthetic peptide
IPYNPQSQGVV

SEQ ID NO: 3787 - protein, 9 aa, Artificial Sequence
  Description of Artificial Sequence: Synthetic peptide
DPDLADHLI

SEQ ID NO: 3788 - protein, 8 aa, Artificial Sequence
  Description of Artificial Sequence: Synthetic peptide
SPVSILDI

SEQ ID NO: 3789 - protein, 10 aa, Artificial Sequence
  Description of Artificial Sequence: Synthetic peptide
IPLGEARLIV

SEQ ID NO: 3790 - protein, 9 aa, Artificial Sequence
  Description of Artificial Sequence: Synthetic peptide
FPISPIETV

SEQ ID NO: 3791 - protein, 9 aa, Artificial Sequence
  Description of Artificial Sequence: Synthetic peptide
SPAAPGVGA

SEQ ID NO: 3792 - protein, 9 aa, Artificial Sequence
  Description of Artificial Sequence: Synthetic peptide
LPHAQRVST

SEQ ID NO: 3793 - protein, 9 aa, Artificial Sequence
  Description of Artificial Sequence: Synthetic peptide
EPIPIHYCA

SEQ ID NO: 3794 - protein, 10 aa, Artificial Sequence
  Description of Artificial Sequence: Synthetic peptide
EPLGIAPTKA

SEQ ID NO: 3795 - protein, 10 aa, Artificial Sequence
  Description of Artificial Sequence: Synthetic peptide
EPLGIAPTEA

SEQ ID NO: 3796 - protein, 9 aa, Artificial Sequence
  Description of Artificial Sequence: Synthetic peptide
AAFLGFLGA

SEQ ID NO: 3797 - protein, 9 aa, Artificial Sequence
  Description of Artificial Sequence: Synthetic peptide
HVASGYIEA

SEQ ID NO: 3798 - protein, 9 aa, Artificial Sequence
  Description of Artificial Sequence: Synthetic peptide
HPGSQPKTA

SEQ ID NO: 3799 - protein, 11 aa, Artificial Sequence
  Description of Artificial Sequence: Synthetic peptide
VPVDPSEVEEA

SEQ ID NO: 3800 - protein, 9 aa, Artificial Sequence
  Description of Artificial Sequence: Synthetic peptide
NPYNTPVFA

SEQ ID NO: 3801 - protein, 10 aa, Artificial Sequence
  Description of Artificial Sequence: Synthetic peptide
LPLAILSIVG

SEQ ID NO: 3802 - protein, 9 aa, Artificial Sequence
  Description of Artificial Sequence: Synthetic peptide
LPLAILSIV

SEQ ID NO: 3803 - protein, 8 aa, Artificial Sequence
  Description of Artificial Sequence: Synthetic peptide
TAFTIPSI

SEQ ID NO: 3804 - protein, 10 aa, Artificial Sequence
  Description of Artificial Sequence: Synthetic peptide
FPQSRTEPTA

SEQ ID NO: 3805 - protein, 10 aa, Artificial Sequence
  Description of Artificial Sequence: Synthetic peptide
EPLGVAPTRA

SEQ ID NO: 3806 - protein, 9 aa, Artificial Sequence
  Description of Artificial Sequence: Synthetic peptide
HPGSQPRTA

SEQ ID NO: 3807 - protein, 10 aa, Artificial Sequence
  Description of Artificial Sequence: Synthetic peptide
SPLAILSIVG

SEQ ID NO: 3808 - protein, 11 aa, Artificial Sequence
  Description of Artificial Sequence: Synthetic peptide
VPVEPSEVEEA

SEQ ID NO: 3809 - protein, 9 aa, Artificial Sequence
  Description of Artificial Sequence: Synthetic peptide
FPNATTIIF

SEQ ID NO: 3810 - protein, 11 aa, Artificial Sequence
  Description of Artificial Sequence: Synthetic peptide
LPPVVAKEIVA

SEQ ID NO: 3811 - protein, 9 aa, Artificial Sequence
  Description of Artificial Sequence: Synthetic peptide
IPKQSLPQA

SEQ ID NO: 3812 - protein, 9 aa, Artificial Sequence
  Description of Artificial Sequence: Synthetic peptide
YPIVQNAQG

SEQ ID NO: 3813 - protein, 8 aa, Artificial Sequence
  Description of Artificial Sequence: Synthetic peptide
TAFTIPST

SEQ ID NO: 3814 - protein, 11 aa, Artificial Sequence
  Description of Artificial Sequence: Synthetic peptide
FPISPIETVPV

SEQ ID NO: 3815 - protein, 11 aa, Artificial Sequence
  Description of Artificial Sequence: Synthetic peptide
VPVNPSEVEEA

SEQ ID NO: 3816 - protein, 11 aa, Artificial Sequence
  Description of Artificial Sequence: Synthetic peptide
NPVSEQSLPHA

SEQ ID NO: 3817 - protein, 9 aa, Artificial Sequence
  Description of Artificial Sequence: Synthetic peptide
EPYNPAISL

SEQ ID NO: 3818 - protein, 9 aa, Artificial Sequence
  Description of Artificial Sequence: Synthetic peptide
SPLAILSIV

SEQ ID NO: 3819 - protein, 10 aa, Artificial Sequence
  Description of Artificial Sequence: Synthetic peptide
LPLVILAIVG

SEQ ID NO: 3820 - protein, 11 aa, Artificial Sequence
  Description of Artificial Sequence: Synthetic peptide
MLNTVGGHQAA

SEQ ID NO: 3821 - protein, 9 aa, Artificial Sequence
  Description of Artificial Sequence: Synthetic peptide
HPVHAGPIP

SEQ ID NO: 3822 - protein, 9 aa, Artificial Sequence
  Description of Artificial Sequence: Synthetic peptide
EVHIPLKEA

SEQ ID NO: 3823 - protein, 10 aa, Artificial Sequence
  Description of Artificial Sequence: Synthetic peptide
HPVHAGPIPP

SEQ ID NO: 3824 - protein, 9 aa, Artificial Sequence
  Description of Artificial Sequence: Synthetic peptide
SPAAPGVGA

SEQ ID NO: 3825 - protein, 9 aa, Artificial Sequence
  Description of Artificial Sequence: Synthetic peptide
IPKQSLPQA

SEQ ID NO: 3826 - protein, 9 aa, Artificial Sequence
  Description of Artificial Sequence: Synthetic peptide
FPISPIETV

SEQ ID NO: 3827 - protein, 9 aa, Artificial Sequence
  Description of Artificial Sequence: Synthetic peptide
NPYPTPRGS

SEQ ID NO: 3828 - protein, 9 aa, Artificial Sequence
  Description of Artificial Sequence: Synthetic peptide
SPAAPGVGA

SEQ ID NO: 3829 - protein, 9 aa, Artificial Sequence
  Description of Artificial Sequence: Synthetic peptide
FPISPIETV

SEQ ID NO: 3830 - protein, 11 aa, Artificial Sequence
  Description of Artificial Sequence: Synthetic peptide
GPNFTSATVKA

SEQ ID NO: 3831 - protein, 11 aa, Artificial Sequence
  Description of Artificial Sequence: Synthetic peptide
GPNFTSAAVKA

SEQ ID NO: 3832 - protein, 11 aa, Artificial Sequence
  Description of Artificial Sequence: Synthetic peptide
GPNFISATVKA

SEQ ID NO: 3833 - protein, 9 aa, Artificial Sequence
  Description of Artificial Sequence: Synthetic peptide
IPKQSLPQA

SEQ ID NO: 3834 - protein, 10 aa, Artificial Sequence
  Description of Artificial Sequence: Synthetic peptide
EPLGIAPTEA

SEQ ID NO: 3835 - protein, 10 aa, Artificial Sequence
  Description of Artificial Sequence: Synthetic peptide
IPAETGQETA

SEQ ID NO: 3836 - protein, 9 aa, Artificial Sequence
  Description of Artificial Sequence: Synthetic peptide
NPYNTPVFA

SEQ ID NO: 3837 - protein, 11 aa, Artificial Sequence
  Description of Artificial Sequence: Synthetic peptide
NPIPKQSLPQA

SEQ ID NO: 3838 - protein, 10 aa, Artificial Sequence
  Description of Artificial Sequence: Synthetic peptide
EPLGIAPTKA

SEQ ID NO: 3839 - protein, 9 aa, Artificial Sequence
  Description of Artificial Sequence: Synthetic peptide
GPNFISATV

SEQ ID NO: 3840 - protein, 9 aa, Artificial Sequence
  Description of Artificial Sequence: Synthetic peptide
GPNFTSATV

SEQ ID NO: 3841 - protein, 9 aa, Artificial Sequence
  Description of Artificial Sequence: Synthetic peptide
HPGSQPKTA

SEQ ID NO: 3842 - protein, 11 aa, Artificial Sequence
  Description of Artificial Sequence: Synthetic peptide
VPVDPSEVEEA

SEQ ID NO: 3843 - protein, 10 aa, Artificial Sequence
  Description of Artificial Sequence: Synthetic peptide
IPYNPQSQGV

SEQ ID NO: 3844 - protein, 9 aa, Artificial Sequence
  Description of Artificial Sequence: Synthetic peptide
SPAAPGVGA

SEQ ID NO: 3845 - protein, 9 aa, Artificial Sequence
  Description of Artificial Sequence: Synthetic peptide
FPISPIETV

SEQ ID NO: 3846 - protein, 11 aa, Artificial Sequence
  Description of Artificial Sequence: Synthetic peptide
GPNFTSATVKA

SEQ ID NO: 3847 - protein, 9 aa, Artificial Sequence
  Description of Artificial Sequence: Synthetic peptide
LPHAQRVST

SEQ ID NO: 3848 - protein, 10 aa, Artificial Sequence
  Description of Artificial Sequence: Synthetic peptide
IPYNPQSQGV

SEQ ID NO: 3849 - protein, 10 aa, Artificial Sequence
  Description of Artificial Sequence: Synthetic peptide
APAGFAILKC

SEQ ID NO: 3850 - protein, 11 aa, Artificial Sequence
  Description of Artificial Sequence: Synthetic peptide
GPNFTSAAVKA

SEQ ID NO: 3851 - protein, 11 aa, Artificial Sequence
  Description of Artificial Sequence: Synthetic peptide
GPNFISATVKA

SEQ ID NO: 3852 - protein, 9 aa, Artificial Sequence
  Description of Artificial Sequence: Synthetic peptide
IPKQSLPQA

SEQ ID NO: 3853 - protein, 9 aa, Artificial Sequence
  Description of Artificial Sequence: Synthetic peptide
GPNFISATV

SEQ ID NO: 3854 - protein, 9 aa, Artificial Sequence
  Description of Artificial Sequence: Synthetic peptide
AAFLGFLGA

SEQ ID NO: 3855 - protein, 10 aa, Artificial Sequence
  Description of Artificial Sequence: Synthetic peptide
RPLVTVKIEG

SEQ ID NO: 3856 - protein, 10 aa, Artificial Sequence
  Description of Artificial Sequence: Synthetic peptide
IPAETGQETA

SEQ ID NO: 3857 - protein, 9 aa, Artificial Sequence
  Description of Artificial Sequence: Synthetic peptide
GPNFTSATV

SEQ ID NO: 3858 - protein, 10 aa, Artificial Sequence
  Description of Artificial Sequence: Synthetic peptide
SPEVIPMFSA

SEQ ID NO: 3859 - protein, 9 aa, Artificial Sequence
  Description of Artificial Sequence: Synthetic peptide
HPGSQPKTA

SEQ ID NO: 3860 - protein, 11 aa, Artificial Sequence
  Description of Artificial Sequence: Synthetic peptide
VPVDPSEVEEA

SEQ ID NO: 3861 - protein, 11 aa, Artificial Sequence
  Description of Artificial Sequence: Synthetic peptide
VPVEPSEVEEA

SEQ ID NO: 3862 - protein, 10 aa, Artificial Sequence
  Description of Artificial Sequence: Synthetic peptide
APAGYAILKC

SEQ ID NO: 3863 - protein, 9 aa, Artificial Sequence
  Description of Artificial Sequence: Synthetic peptide
GVRPTPPAA

SEQ ID NO: 3864 - protein, 10 aa, Artificial Sequence
  Description of Artificial Sequence: Synthetic peptide
EPLGIAPTKA

SEQ ID NO: 3865 - protein, 9 aa, Artificial Sequence
  Description of Artificial Sequence: Synthetic peptide
LPQAQRVPT

SEQ ID NO: 3866 - protein, 9 aa, Artificial Sequence
  Description of Artificial Sequence: Synthetic peptide
TTVPWNTSW

SEQ ID NO: 3867 - protein, 11 aa, Artificial Sequence
  Description of Artificial Sequence: Synthetic peptide
KAYDTEVHNVW

SEQ ID NO: 3868 - protein, 9 aa, Artificial Sequence
  Description of Artificial Sequence: Synthetic peptide
TTVPWNSSW

SEQ ID NO: 3869 - protein, 11 aa, Artificial Sequence
  Description of Artificial Sequence: Synthetic peptide
KAYDREVHNVW

SEQ ID NO: 3870 - protein, 11 aa, Artificial Sequence
  Description of Artificial Sequence: Synthetic peptide
KAYATEKHNVW

SEQ ID NO: 3871 - protein, 9 aa, Artificial Sequence
  Description of Artificial Sequence: Synthetic peptide
STLQEQIGW

SEQ ID NO: 3872 - protein, 10 aa, Artificial Sequence
  Description of Artificial Sequence: Synthetic peptide
GTQRNYQHLW

SEQ ID NO: 3873 - protein, 9 aa, Artificial Sequence
  Description of Artificial Sequence: Synthetic peptide
WTKEGNSTW

SEQ ID NO: 3874 - protein, 9 aa, Artificial Sequence
  Description of Artificial Sequence: Synthetic peptide
ASILAIVVW

SEQ ID NO: 3875 - protein, 11 aa, Artificial Sequence
  Description of Artificial Sequence: Synthetic peptide
STWTKEGNSTW

SEQ ID NO: 3876 - protein, 9 aa, Artificial Sequence
  Description of Artificial Sequence: Synthetic peptide
KIKQIINMW

SEQ ID NO: 3877 - protein, 9 aa, Artificial Sequence
  Description of Artificial Sequence: Synthetic peptide
TTGLFNSTW

SEQ ID NO: 3878 - protein, 9 aa, Artificial Sequence
  Description of Artificial Sequence: Synthetic peptide
RIKQIINMW

SEQ ID NO: 3879 - protein, 9 aa, Artificial Sequence
  Description of Artificial Sequence: Synthetic peptide
RSIRLVNGF

SEQ ID NO: 3880 - protein, 10 aa, Artificial Sequence
  Description of Artificial Sequence: Synthetic peptide
ATDVRWNSSW

SEQ ID NO: 3881 - protein, 10 aa, Artificial Sequence
  Description of Artificial Sequence: Synthetic peptide
SSLKGLRLGW

SEQ ID NO: 3882 - protein, 9 aa, Artificial Sequence
  Description of Artificial Sequence: Synthetic peptide
KALTDIVTL

SEQ ID NO: 3883 - protein, 10 aa, Artificial Sequence
  Description of Artificial Sequence: Synthetic peptide
ATTVPWNTSW

SEQ ID NO: 3884 - protein, 9 aa, Artificial Sequence
  Description of Artificial Sequence: Synthetic peptide
KTQEVYSLF

SEQ ID NO: 3885 - protein, 11 aa, Artificial Sequence
  Description of Artificial Sequence: Synthetic peptide
TTSTLQEQIGW

SEQ ID NO: 3886 - protein, 9 aa, Artificial Sequence
  Description of Artificial Sequence: Synthetic peptide
TQRNYQHLW

SEQ ID NO: 3887 - protein, 9 aa, Artificial Sequence
  Description of Artificial Sequence: Synthetic peptide
TIAVAVAEW

SEQ ID NO: 3888 - protein, 10 aa, Artificial Sequence
  Description of Artificial Sequence: Synthetic peptide
KIATESIVIW

SEQ ID NO: 3889 - protein, 10 aa, Artificial Sequence
  Description of Artificial Sequence: Synthetic peptide
AVSPRTLNAW

SEQ ID NO: 3890 - protein, 9 aa, Artificial Sequence
  Description of Artificial Sequence: Synthetic peptide
RVMGTQRNY

SEQ ID NO: 3891 - protein, 10 aa, Artificial Sequence
  Description of Artificial Sequence: Synthetic peptide
RVIEIGQRAF

SEQ ID NO: 3892 - protein, 11 aa, Artificial Sequence
  Description of Artificial Sequence: Synthetic peptide
SVLSGGKLEAW

SEQ ID NO: 3893 - protein, 9 aa, Artificial Sequence
  Description of Artificial Sequence: Synthetic peptide
YNFPQITLW

SEQ ID NO: 3894 - protein, 10 aa, Artificial Sequence
  Description of Artificial Sequence: Synthetic peptide
VTVYYGVPVW

SEQ ID NO: 3895 - protein, 9 aa, Artificial Sequence
  Description of Artificial Sequence: Synthetic peptide
KTQKVYSLF

SEQ ID NO: 3896 - protein, 10 aa, Artificial Sequence
  Description of Artificial Sequence: Synthetic peptide
TTTVPWNSSW

SEQ ID NO: 3897 - protein, 9 aa, Artificial Sequence
  Description of Artificial Sequence: Synthetic peptide
LGHGVSIEW

SEQ ID NO: 3898 - protein, 9 aa, Artificial Sequence
  Description of Artificial Sequence: Synthetic peptide
RTKPPLPSV

SEQ ID NO: 3899 - protein, 9 aa, Artificial Sequence
  Description of Artificial Sequence: Synthetic peptide
ITMESIVIW

SEQ ID NO: 3900 - protein, 11 aa, Artificial Sequence
  Description of Artificial Sequence: Synthetic peptide
SVLSGGKLDAW

SEQ ID NO: 3901 - protein, 11 aa, Artificial Sequence
  Description of Artificial Sequence: Synthetic peptide
KALTDIVPLTR

SEQ ID NO: 3902 - protein, 9 aa, Artificial Sequence
  Description of Artificial Sequence: Synthetic peptide
RSIRLVSGF

SEQ ID NO: 3903 - protein, 9 aa, Artificial Sequence
  Description of Artificial Sequence: Synthetic peptide
QATQDVKNW

SEQ ID NO: 3904 - protein, 9 aa, Artificial Sequence
  Description of Artificial Sequence: Synthetic peptide
KTAVQMAVF

SEQ ID NO: 3905 - protein, 11 aa, Artificial Sequence
  Description of Artificial Sequence: Synthetic peptide
KSLYNTIAVLY

SEQ ID NO: 3906 - protein, 9 aa, Artificial Sequence
  Description of Artificial Sequence: Synthetic peptide
YATEKHNVW

SEQ ID NO: 3907 - protein, 11 aa, Artificial Sequence
  Description of Artificial Sequence: Synthetic peptide
KSIRFGPGQAF

SEQ ID NO: 3908 - protein, 10 aa, Artificial Sequence
  Description of Artificial Sequence: Synthetic peptide
TSNLQEQIGW

SEQ ID NO: 3909 - protein, 9 aa, Artificial Sequence
  Description of Artificial Sequence: Synthetic peptide
KAIEAQQQL

SEQ ID NO: 3910 - protein, 9 aa, Artificial Sequence
  Description of Artificial Sequence: Synthetic peptide
TTVPWNTSW

SEQ ID NO: 3911 - protein, 9 aa, Artificial Sequence
  Description of Artificial Sequence: Synthetic peptide
KAIEAQQQM

SEQ ID NO: 3912 - protein, 9 aa, Artificial Sequence
  Description of Artificial Sequence: Synthetic peptide
KALTDIVTL

SEQ ID NO: 3913 - protein, 9 aa, Artificial Sequence
  Description of Artificial Sequence: Synthetic peptide
STLQEQIGW

SEQ ID NO: 3914 - protein, 9 aa, Artificial Sequence
  Description of Artificial Sequence: Synthetic peptide
TIAVAVAEW

SEQ ID NO: 3915 - protein, 10 aa, Artificial Sequence
  Description of Artificial Sequence: Synthetic peptide
TAATNPDCAW

SEQ ID NO: 3916 - protein, 8 aa, Artificial Sequence
  Description of Artificial Sequence: Synthetic peptide
IAVAVAEW

SEQ ID NO: 3917 - protein, 11 aa, Artificial Sequence
  Description of Artificial Sequence: Synthetic peptide
GTEKQGTTHSY

SEQ ID NO: 3918 - protein, 9 aa, Artificial Sequence
  Description of Artificial Sequence: Synthetic peptide
TTVPWNSSW

SEQ ID NO: 3919 - protein, 11 aa, Artificial Sequence
  Description of Artificial Sequence: Synthetic peptide
KAYDTEVHNVW

SEQ ID NO: 3920 - protein, 9 aa, Artificial Sequence
  Description of Artificial Sequence: Synthetic peptide
GTEELRSLY

SEQ ID NO: 3921 - protein, 10 aa, Artificial Sequence
  Description of Artificial Sequence: Synthetic peptide
KAIEAQQQLL

SEQ ID NO: 3922 - protein, 9 aa, Artificial Sequence
  Description of Artificial Sequence: Synthetic peptide
NTELIIYQY

SEQ ID NO: 3923 - protein, 9 aa, Artificial Sequence
  Description of Artificial Sequence: Synthetic peptide
GTEELKSLY

SEQ ID NO: 3924 - protein, 10 aa, Artificial Sequence
  Description of Artificial Sequence: Synthetic peptide
KAIEAQQQML

SEQ ID NO: 3925 - protein, 9 aa, Artificial Sequence
  Description of Artificial Sequence: Synthetic peptide
TTGLFNSTW

SEQ ID NO: 3926 - protein, 9 aa, Artificial Sequence
  Description of Artificial Sequence: Synthetic peptide
KLEEEQNKY

SEQ ID NO: 3927 - protein, 8 aa, Artificial Sequence
  Description of Artificial Sequence: Synthetic peptide
ATEKHNVW

SEQ ID NO: 3928 - protein, 9 aa, Artificial Sequence
  Description of Artificial Sequence: Synthetic peptide
WTKEGNSTW

SEQ ID NO: 3929 - protein, 10 aa, Artificial Sequence
  Description of Artificial Sequence: Synthetic peptide
AVSPRTLNAW

SEQ ID NO: 3930 - protein, 9 aa, Artificial Sequence
  Description of Artificial Sequence: Synthetic peptide
KTQEVYSLF

SEQ ID NO: 3931 - protein, 9 aa, Artificial Sequence
  Description of Artificial Sequence: Synthetic peptide
AATNPDCAW

SEQ ID NO: 3932 - protein, 9 aa, Artificial Sequence
  Description of Artificial Sequence: Synthetic peptide
QAIEAQQHL

SEQ ID NO: 3933 - protein, 9 aa, Artificial Sequence
  Description of Artificial Sequence: Synthetic peptide
RAVGLGAAF

SEQ ID NO: 3934 - protein, 9 aa, Artificial Sequence
  Description of Artificial Sequence: Synthetic peptide
KTAVQMAVF

SEQ ID NO: 3935 - protein, 10 aa, Artificial Sequence
  Description of Artificial Sequence: Synthetic peptide
TAANNPDCAW

SEQ ID NO: 3936 - protein, 9 aa, Artificial Sequence
  Description of Artificial Sequence: Synthetic peptide
RTKPPLPSV

SEQ ID NO: 3937 - protein, 9 aa, Artificial Sequence
  Description of Artificial Sequence: Synthetic peptide
RAVGLGAVF

SEQ ID NO: 3938 - protein, 9 aa, Artificial Sequence
  Description of Artificial Sequence: Synthetic peptide
QATQDVKNW

SEQ ID NO: 3939 - protein, 11 aa, Artificial Sequence
  Description of Artificial Sequence: Synthetic peptide
STWTKEGNSTW

SEQ ID NO: 3940 - protein, 9 aa, Artificial Sequence
  Description of Artificial Sequence: Synthetic peptide
TINEEAAEW

SEQ ID NO: 3941 - protein, 9 aa, Artificial Sequence
  Description of Artificial Sequence: Synthetic peptide
AANNPDCAW

SEQ ID NO: 3942 - protein, 10 aa, Artificial Sequence
  Description of Artificial Sequence: Synthetic peptide
QAIEAQQHLL

SEQ ID NO: 3943 - protein, 8 aa, Artificial Sequence
  Description of Artificial Sequence: Synthetic peptide
NSPTSREL

SEQ ID NO: 3944 - protein, 9 aa, Artificial Sequence
  Description of Artificial Sequence: Synthetic peptide
ALPVGTEEL

SEQ ID NO: 3945 - protein, 9 aa, Artificial Sequence
  Description of Artificial Sequence: Synthetic peptide
YSPVSILDI

SEQ ID NO: 3946 - protein, 9 aa, Artificial Sequence
  Description of Artificial Sequence: Synthetic peptide
NAKNIIVQF

SEQ ID NO: 3947 - protein, 9 aa, Artificial Sequence
  Description of Artificial Sequence: Synthetic peptide
FSVPLHEDF

SEQ ID NO: 3948 - protein, 9 aa, Artificial Sequence
  Description of Artificial Sequence: Synthetic peptide
NTELIIYQY

SEQ ID NO: 3949 - protein, 9 aa, Artificial Sequence
  Description of Artificial Sequence: Synthetic peptide
ATDLWVTVY

SEQ ID NO: 3950 - protein, 9 aa, Artificial Sequence
  Description of Artificial Sequence: Synthetic peptide
GTEELKSLY

SEQ ID NO: 3951 - protein, 9 aa, Artificial Sequence
  Description of Artificial Sequence: Synthetic peptide
TEAVQKITM

SEQ ID NO: 3952 - protein, 9 aa, Artificial Sequence
  Description of Artificial Sequence: Synthetic peptide
TEAVQKIVM

SEQ ID NO: 3953 - protein, 10 aa, Artificial Sequence
  Description of Artificial Sequence: Synthetic peptide
STEEIKNCSY

SEQ ID NO: 3954 - protein, 9 aa, Artificial Sequence
  Description of Artificial Sequence: Synthetic peptide
GTEELRSLY

SEQ ID NO: 3955 - protein, 9 aa, Artificial Sequence
  Description of Artificial Sequence: Synthetic peptide
TEEIKNCSY

SEQ ID NO: 3956 - protein, 8 aa, Artificial Sequence
  Description of Artificial Sequence: Synthetic peptide
VLDVGDAY

SEQ ID NO: 3957 - protein, 9 aa, Artificial Sequence
  Description of Artificial Sequence: Synthetic peptide
KAIEAQQQL

SEQ ID NO: 3958 - protein, 9 aa, Artificial Sequence
  Description of Artificial Sequence: Synthetic peptide
RALGPGASL

SEQ ID NO: 3959 - protein, 9 aa, Artificial Sequence
  Description of Artificial Sequence: Synthetic peptide
QAIEAQQHL

SEQ ID NO: 3960 - protein, 9 aa, Artificial Sequence
  Description of Artificial Sequence: Synthetic peptide
RALGPGATL

SEQ ID NO: 3961 - protein, 9 aa, Artificial Sequence
  Description of Artificial Sequence: Synthetic peptide
LAWDDLRSL

SEQ ID NO: 3962 - protein, 9 aa, Artificial Sequence
  Description of Artificial Sequence: Synthetic peptide
IASSSKQEL

SEQ ID NO: 3963 - protein, 9 aa, Artificial Sequence
  Description of Artificial Sequence: Synthetic peptide
KAIEAQQQL

SEQ ID NO: 3964 - protein, 9 aa, Artificial Sequence
  Description of Artificial Sequence: Synthetic peptide
IASSSKQEL

SEQ ID NO: 3965 - protein, 9 aa, Artificial Sequence
  Description of Artificial Sequence: Synthetic peptide
RALGPGASL

SEQ ID NO: 3966 - protein, 9 aa, Artificial Sequence
  Description of Artificial Sequence: Synthetic peptide
QAIEAQQHL

SEQ ID NO: 3967 - protein, 9 aa, Artificial Sequence
  Description of Artificial Sequence: Synthetic peptide
GAVDLSHFL

SEQ ID NO: 3968 - protein, 9 aa, Artificial Sequence
  Description of Artificial Sequence: Synthetic peptide
YSTQIDPDL

SEQ ID NO: 3969 - protein, 9 aa, Artificial Sequence
  Description of Artificial Sequence: Synthetic peptide
RALGPGATL

SEQ ID NO: 3970 - protein, 9 aa, Artificial Sequence
  Description of Artificial Sequence: Synthetic peptide
ATDIQTKEL

SEQ ID NO: 3971 - protein, 9 aa, Artificial Sequence
  Description of Artificial Sequence: Synthetic peptide
YVDRFFKTL

SEQ ID NO: 3972 - protein, 9 aa, Artificial Sequence
  Description of Artificial Sequence: Synthetic peptide
LAWDDLRSL

SEQ ID NO: 3973 - protein, 9 aa, Artificial Sequence
  Description of Artificial Sequence: Synthetic peptide
SAEPVPLQL

SEQ ID NO: 3974 - protein, 9 aa, Artificial Sequence
  Description of Artificial Sequence: Synthetic peptide
KAIEAQQQM

SEQ ID NO: 3975 - protein, 9 aa, Artificial Sequence
  Description of Artificial Sequence: Synthetic peptide
LFDTIAVAV

SEQ ID NO: 3976 - protein, 8 aa, Artificial Sequence
  Description of Artificial Sequence: Synthetic peptide
AFDLSHFL

SEQ ID NO: 3977 - protein, 9 aa, Artificial Sequence
  Description of Artificial Sequence: Synthetic peptide
QYDQIVIEI

SEQ ID NO: 3978 - protein, 9 aa, Artificial Sequence
  Description of Artificial Sequence: Synthetic peptide
QYDQIAIEI

SEQ ID NO: 3979 - protein, 9 aa, Artificial Sequence
  Description of Artificial Sequence: Synthetic peptide
FYELDVVLL

SEQ ID NO: 3980 - protein, 8 aa, Artificial Sequence
  Description of Artificial Sequence: Synthetic peptide
KADWNVTL

SEQ ID NO: 3981 - protein, 9 aa, Artificial Sequence
  Description of Artificial Sequence: Synthetic peptide
RSDDPDESL

SEQ ID NO: 3982 - protein, 9 aa, Artificial Sequence
  Description of Artificial Sequence: Synthetic peptide
HTDNGPNFI

SEQ ID NO: 3983 - protein, 9 aa, Artificial Sequence
  Description of Artificial Sequence: Synthetic peptide
SAEPVPLQL

SEQ ID NO: 3984 - protein, 8 aa, Artificial Sequence
  Description of Artificial Sequence: Synthetic peptide
AVDLSHFL

SEQ ID NO: 3985 - protein, 9 aa, Artificial Sequence
  Description of Artificial Sequence: Synthetic peptide
IQDNGDIKV

SEQ ID NO: 3986 - protein, 10 aa, Artificial Sequence
  Description of Artificial Sequence: Synthetic peptide
RSDDPDESLL

SEQ ID NO: 3987 - protein, 9 aa, Artificial Sequence
  Description of Artificial Sequence: Synthetic peptide
LVDAIAVTV

SEQ ID NO: 3988 - protein, 9 aa, Artificial Sequence
  Description of Artificial Sequence: Synthetic peptide
GGDPEITTL

SEQ ID NO: 3989 - protein, 9 aa, Artificial Sequence
  Description of Artificial Sequence: Synthetic peptide
GVDDPEREV

SEQ ID NO: 3990 - protein, 9 aa, Artificial Sequence
  Description of Artificial Sequence: Synthetic peptide
VLDVGDAYF

SEQ ID NO: 3991 - protein, 9 aa, Artificial Sequence
  Description of Artificial Sequence: Synthetic peptide
GIDDPEREV

SEQ ID NO: 3992 - protein, 9 aa, Artificial Sequence
  Description of Artificial Sequence: Synthetic peptide
IQDNSDIKV

SEQ ID NO: 3993 - protein, 9 aa, Artificial Sequence
  Description of Artificial Sequence: Synthetic peptide
QRPLVTVKI

SEQ ID NO: 3994 - protein, 10 aa, Artificial Sequence
  Description of Artificial Sequence: Synthetic peptide
IRFGPGQAFY

SEQ ID NO: 3995 - protein, 9 aa, Artificial Sequence
  Description of Artificial Sequence: Synthetic peptide
IRYLQQLLF

SEQ ID NO: 3996 - protein, 9 aa, Artificial Sequence
  Description of Artificial Sequence: Synthetic peptide
ARNPEMVIY

SEQ ID NO: 3997 - protein, 9 aa, Artificial Sequence
  Description of Artificial Sequence: Synthetic peptide
LKTPVHGVY

SEQ ID NO: 3998 - protein, 8 aa, Artificial Sequence
  Description of Artificial Sequence: Synthetic peptide
IVGLIVAL

SEQ ID NO: 3999 - protein, 9 aa, Artificial Sequence
  Description of Artificial Sequence: Synthetic peptide
SAISLFDTI

SEQ ID NO: 4000 - protein, 9 aa, Artificial Sequence
  Description of Artificial Sequence: Synthetic peptide
KAIEAQQQL

SEQ ID NO: 4001 - protein, 9 aa, Artificial Sequence
  Description of Artificial Sequence: Synthetic peptide
SAVNLVDAI

SEQ ID NO: 4002 - protein, 9 aa, Artificial Sequence
  Description of Artificial Sequence: Synthetic peptide
KALTDIVTL

SEQ ID NO: 4003 - protein, 9 aa, Artificial Sequence
  Description of Artificial Sequence: Synthetic peptide
SAEPVPLQL

SEQ ID NO: 4004 - protein, 9 aa, Artificial Sequence
  Description of Artificial Sequence: Synthetic peptide
ELVSPKCEY

SEQ ID NO: 4005 - protein, 9 aa, Artificial Sequence
  Description of Artificial Sequence: Synthetic peptide
TIAVAVAEW

SEQ ID NO: 4006 - protein, 9 aa, Artificial Sequence
  Description of Artificial Sequence: Synthetic peptide
FLGAAGSTM

SEQ ID NO: 4007 - protein, 9 aa, Artificial Sequence
  Description of Artificial Sequence: Synthetic peptide
QAIEAQQHL

SEQ ID NO: 4008 - protein, 9 aa, Artificial Sequence
  Description of Artificial Sequence: Synthetic peptide
TVLDVGDAY

SEQ ID NO: 4009 - protein, 9 aa, Artificial Sequence
  Description of Artificial Sequence: Synthetic peptide
GAVDLSHFL

SEQ ID NO: 4010 - protein, 9 aa, Artificial Sequence
  Description of Artificial Sequence: Synthetic peptide
IVTDSQYAL

SEQ ID NO: 4011 - protein, 10 aa, Artificial Sequence
  Description of Artificial Sequence: Synthetic peptide
SALPVGTEEL

SEQ ID NO: 4012 - protein, 9 aa, Artificial Sequence
  Description of Artificial Sequence: Synthetic peptide
EQHTPTISL

SEQ ID NO: 4013 - protein, 9 aa, Artificial Sequence
  Description of Artificial Sequence: Synthetic peptide
KAIEAQQQM

SEQ ID NO: 4014 - protein, 9 aa, Artificial Sequence
  Description of Artificial Sequence: Synthetic peptide
RSDDPDESL

SEQ ID NO: 4015 - protein, 8 aa, Artificial Sequence
  Description of Artificial Sequence: Synthetic peptide
AVDLSHFL

SEQ ID NO: 4016 - protein, 9 aa, Artificial Sequence
  Description of Artificial Sequence: Synthetic peptide
ATDIQTKEL

SEQ ID NO: 4017 - protein, 8 aa, Artificial Sequence
  Description of Artificial Sequence: Synthetic peptide
KADWNVTL

SEQ ID NO: 4018 - protein, 9 aa, Artificial Sequence
  Description of Artificial Sequence: Synthetic peptide
GVDDPEREV

SEQ ID NO: 4019 - protein, 10 aa, Artificial Sequence
  Description of Artificial Sequence: Synthetic peptide
IVELVGHSSL

SEQ ID NO: 4020 - protein, 9 aa, Artificial Sequence
  Description of Artificial Sequence: Synthetic peptide
GGDPEITTL

SEQ ID NO: 4021 - protein, 9 aa, Artificial Sequence
  Description of Artificial Sequence: Synthetic peptide
GIDDPEREV

SEQ ID NO: 4022 - protein, 10 aa, Artificial Sequence
  Description of Artificial Sequence: Synthetic peptide
GIDDPEREVL

SEQ ID NO: 4023 - protein, 10 aa, Artificial Sequence
  Description of Artificial Sequence: Synthetic peptide
RSDDPDESLL

SEQ ID NO: 4024 - protein, 9 aa, Artificial Sequence
  Description of Artificial Sequence: Synthetic peptide
TQDFWEVQL

SEQ ID NO: 4025 - protein, 10 aa, Artificial Sequence
  Description of Artificial Sequence: Synthetic peptide
GVDDPEREVL

SEQ ID NO: 4026 - protein, 9 aa, Artificial Sequence
  Description of Artificial Sequence: Synthetic peptide
HTDNGPNFI

SEQ ID NO: 4027 - protein, 9 aa, Artificial Sequence
  Description of Artificial Sequence: Synthetic peptide
MGEEITSSL

SEQ ID NO: 4028 - protein, 10 aa, Artificial Sequence
  Description of Artificial Sequence: Synthetic peptide
HLDFGDVNNV

SEQ ID NO: 4029 - protein, 9 aa, Artificial Sequence
  Description of Artificial Sequence: Synthetic peptide
SAEPVPLQL

SEQ ID NO: 4030 - protein, 9 aa, Artificial Sequence
  Description of Artificial Sequence: Synthetic peptide
RNDSSSETF

SEQ ID NO: 4031 - protein, 9 aa, Artificial Sequence
  Description of Artificial Sequence: Synthetic peptide
LVDAIAVTV

SEQ ID NO: 4032 - protein, 9 aa, Artificial Sequence
  Description of Artificial Sequence: Synthetic peptide
RALGPGATL

SEQ ID NO: 4033 - protein, 9 aa, Artificial Sequence
  Description of Artificial Sequence: Synthetic peptide
RALGPGASL

SEQ ID NO: 4034 - protein, 10 aa, Artificial Sequence
  Description of Artificial Sequence: Synthetic peptide
SLFGNDPLLQ

SEQ ID NO: 4035 - protein, 9 aa, Artificial Sequence
  Description of Artificial Sequence: Synthetic peptide
KALTDIVTL

SEQ ID NO: 4036 - protein, 9 aa, Artificial Sequence
  Description of Artificial Sequence: Synthetic peptide
NAKNIIVQF

SEQ ID NO: 4037 - protein, 9 aa, Artificial Sequence
  Description of Artificial Sequence: Synthetic peptide
KAADLWVTV

SEQ ID NO: 4038 - protein, 9 aa, Artificial Sequence
  Description of Artificial Sequence: Synthetic peptide
ATNLWVTVY

SEQ ID NO: 4039 - protein, 10 aa, Artificial Sequence
  Description of Artificial Sequence: Synthetic peptide
VTFEPIPIHY

SEQ ID NO: 4040 - protein, 9 aa, Artificial Sequence
  Description of Artificial Sequence: Synthetic peptide
YATEKHNVW

SEQ ID NO: 4041 - protein, 10 aa, Artificial Sequence
  Description of Artificial Sequence: Synthetic peptide
VSFEPIPIHY

SEQ ID NO: 4042 - protein, 9 aa, Artificial Sequence
  Description of Artificial Sequence: Synthetic peptide
GAASITLTV

SEQ ID NO: 4043 - protein, 9 aa, Artificial Sequence
  Description of Artificial Sequence: Synthetic peptide
KATDLWVTV

SEQ ID NO: 4044 - protein, 9 aa, Artificial Sequence
  Description of Artificial Sequence: Synthetic peptide
HFPNKTIIF

SEQ ID NO: 4045 - protein, 9 aa, Artificial Sequence
  Description of Artificial Sequence: Synthetic peptide
IYQEPFKNL

SEQ ID NO: 4046 - protein, 10 aa, Artificial Sequence
  Description of Artificial Sequence: Synthetic peptide
AFQQREAREF

SEQ ID NO: 4047 - protein, 8 aa, Artificial Sequence
  Description of Artificial Sequence: Synthetic peptide
SYNTTTIL

SEQ ID NO: 4048 - protein, 8 aa, Artificial Sequence
  Description of Artificial Sequence: Synthetic peptide
SYNMPTEL

SEQ ID NO: 4049 - protein, 9 aa, Artificial Sequence
  Description of Artificial Sequence: Synthetic peptide
TYQIYQEPF

SEQ ID NO: 4050 - protein, 8 aa, Artificial Sequence
  Description of Artificial Sequence: Synthetic peptide
VYNTQGYF

SEQ ID NO: 4051 - protein, 8 aa, Artificial Sequence
  Description of Artificial Sequence: Synthetic peptide
SYLMPTEL

SEQ ID NO: 4052 - protein, 10 aa, Artificial Sequence
  Description of Artificial Sequence: Synthetic peptide
GFLGAAGSTM

SEQ ID NO: 4053 - protein, 9 aa, Artificial Sequence
  Description of Artificial Sequence: Synthetic peptide
KFPKKTIIF

SEQ ID NO: 4054 - protein, 8 aa, Artificial Sequence
  Description of Artificial Sequence: Synthetic peptide
RFGPGQAF

SEQ ID NO: 4055 - protein, 8 aa, Artificial Sequence
  Description of Artificial Sequence: Synthetic peptide
VYHTQGYF

SEQ ID NO: 4056 - protein, 9 aa, Artificial Sequence
  Description of Artificial Sequence: Synthetic peptide
SYQIYQEPF

SEQ ID NO: 4057 - protein, 9 aa, Artificial Sequence
  Description of Artificial Sequence: Synthetic peptide
KYHSNWRAM

SEQ ID NO: 4058 - protein, 9 aa, Artificial Sequence
  Description of Artificial Sequence: Synthetic peptide
LYNTIAVLY

SEQ ID NO: 4059 - protein, 8 aa, Artificial Sequence
  Description of Artificial Sequence: Synthetic peptide
SYNTTTIL

SEQ ID NO: 4060 - protein, 9 aa, Artificial Sequence
  Description of Artificial Sequence: Synthetic peptide
IYQEPFKNL

SEQ ID NO: 4061 - protein, 8 aa, Artificial Sequence
  Description of Artificial Sequence: Synthetic peptide
SYLMPTEL

SEQ ID NO: 4062 - protein, 10 aa, Artificial Sequence
  Description of Artificial Sequence: Synthetic peptide
GFLGAAGSTM

SEQ ID NO: 4063 - protein, 8 aa, Artificial Sequence
  Description of Artificial Sequence: Synthetic peptide
SYNMPTEL

SEQ ID NO: 4064 - protein, 8 aa, Artificial Sequence
  Description of Artificial Sequence: Synthetic peptide
LYNTIAVL

SEQ ID NO: 4065 - protein, 9 aa, Artificial Sequence
  Description of Artificial Sequence: Synthetic peptide
TYQIYQEPF

SEQ ID NO: 4066 - protein, 8 aa, Artificial Sequence
  Description of Artificial Sequence: Synthetic peptide
RFGPGQAF

SEQ ID NO: 4067 - protein, 9 aa, Artificial Sequence
  Description of Artificial Sequence: Synthetic peptide
SYQIYQEPF

SEQ ID NO: 4068 - protein, 8 aa, Artificial Sequence
  Description of Artificial Sequence: Synthetic peptide
PYNPAISL

SEQ ID NO: 4069 - protein, 8 aa, Artificial Sequence
  Description of Artificial Sequence: Synthetic peptide
VYNTQGYF

SEQ ID NO: 4070 - protein, 9 aa, Artificial Sequence
  Description of Artificial Sequence: Synthetic peptide
AIITVVNRV

SEQ ID NO: 4071 - protein, 9 aa, Artificial Sequence
  Description of Artificial Sequence: Synthetic peptide
KTELHAIYL

SEQ ID NO: 4072 - protein, 9 aa, Artificial Sequence
  Description of Artificial Sequence: Synthetic peptide
RTKPPLPSV

SEQ ID NO: 4073 - protein, 9 aa, Artificial Sequence
  Description of Artificial Sequence: Synthetic peptide
ANSPTSREL

SEQ ID NO: 4074 - protein, 9 aa, Artificial Sequence
  Description of Artificial Sequence: Synthetic peptide
GAASITLTV

SEQ ID NO: 4075 - protein, 9 aa, Artificial Sequence
  Description of Artificial Sequence: Synthetic peptide
YATEKHNVW

SEQ ID NO: 4076 - protein, 9 aa, Artificial Sequence
  Description of Artificial Sequence: Synthetic peptide
YSTYRLISC

SEQ ID NO: 4077 - protein, 9 aa, Artificial Sequence
  Description of Artificial Sequence: Synthetic peptide
LAREQHPEF

SEQ ID NO: 4078 - protein, 9 aa, Artificial Sequence
  Description of Artificial Sequence: Synthetic peptide
IASSSKQEL

SEQ ID NO: 4079 - protein, 9 aa, Artificial Sequence
  Description of Artificial Sequence: Synthetic peptide
VSSGIRKVL

SEQ ID NO: 4080 - protein, 9 aa, Artificial Sequence
  Description of Artificial Sequence: Synthetic peptide
KAIEAQQQL

SEQ ID NO: 4081 - protein, 9 aa, Artificial Sequence
  Description of Artificial Sequence: Synthetic peptide
IASSSKQEL

SEQ ID NO: 4082 - protein, 9 aa, Artificial Sequence
  Description of Artificial Sequence: Synthetic peptide
KAIEAQQQM

SEQ ID NO: 4083 - protein, 9 aa, Artificial Sequence
  Description of Artificial Sequence: Synthetic peptide
KATDLWVTV

SEQ ID NO: 4084 - protein, 9 aa, Artificial Sequence
  Description of Artificial Sequence: Synthetic peptide
ANSPTSREL

SEQ ID NO: 4085 - protein, 10 aa, Artificial Sequence
  Description of Artificial Sequence: Synthetic peptide
IATDIQTKEL

SEQ ID NO: 4086 - protein, 9 aa, Artificial Sequence
  Description of Artificial Sequence: Synthetic peptide
KAADLWVTV

SEQ ID NO: 4087 - protein, 9 aa, Artificial Sequence
  Description of Artificial Sequence: Synthetic peptide
KATNLWVTV

SEQ ID NO: 4088 - protein, 9 aa, Artificial Sequence
  Description of Artificial Sequence: Synthetic peptide
YAGIQVKQL

SEQ ID NO: 4089 - protein, 9 aa, Artificial Sequence
  Description of Artificial Sequence: Synthetic peptide
QAIEAQQHL

SEQ ID NO: 4090 - protein, 9 aa, Artificial Sequence
  Description of Artificial Sequence: Synthetic peptide
GAASITLTV

SEQ ID NO: 4091 - protein, 9 aa, Artificial Sequence
  Description of Artificial Sequence: Synthetic peptide
KAADLWVTV

SEQ ID NO: 4092 - protein, 11 aa, Artificial Sequence
  Description of Artificial Sequence: Synthetic peptide
AEIQKQGQDQW

SEQ ID NO: 4093 - protein, 11 aa, Artificial Sequence
  Description of Artificial Sequence: Synthetic peptide
SEVNIVTDSQY

SEQ ID NO: 4094 - protein, 10 aa, Artificial Sequence
  Description of Artificial Sequence: Synthetic peptide
TETGVGGHQI

SEQ ID NO: 4095 - protein, 9 aa, Artificial Sequence
  Description of Artificial Sequence: Synthetic peptide
EEINLPGKW

SEQ ID NO: 4096 - protein, 11 aa, Artificial Sequence
  Description of Artificial Sequence: Synthetic peptide
AEIQKQGQGQW

SEQ ID NO: 4097 - protein, 11 aa, Artificial Sequence
  Description of Artificial Sequence: Synthetic peptide
AEQATQDVKNW

SEQ ID NO: 4098 - protein, 9 aa, Artificial Sequence
  Description of Artificial Sequence: Synthetic peptide
KATDLWVTV

SEQ ID NO: 4099 - protein, 9 aa, Artificial Sequence
  Description of Artificial Sequence: Synthetic peptide
IAARTVTLL

SEQ ID NO: 4100 - protein, 8 aa, Artificial Sequence
  Description of Artificial Sequence: Synthetic peptide
IAARIVEL

SEQ ID NO: 4101 - protein, 9 aa, Artificial Sequence
  Description of Artificial Sequence: Synthetic peptide
KALTDIVTL

SEQ ID NO: 4102 - protein, 9 aa, Artificial Sequence
  Description of Artificial Sequence: Synthetic peptide
SAEPVPLQL

SEQ ID NO: 4103 - protein, 9 aa, Artificial Sequence
  Description of Artificial Sequence: Synthetic peptide
GAVDLSHFL

SEQ ID NO: 4104 - protein, 9 aa, Artificial Sequence
  Description of Artificial Sequence: Synthetic peptide
LIAARIVEL

SEQ ID NO: 4105 - protein, 10 aa, Artificial Sequence
  Description of Artificial Sequence: Synthetic peptide
RAVGLGAVFL

SEQ ID NO: 4106 - protein, 8 aa, Artificial Sequence
  Description of Artificial Sequence: Synthetic peptide
IAARTVEL

SEQ ID NO: 4107 - protein, 9 aa, Artificial Sequence
  Description of Artificial Sequence: Synthetic peptide
ISERILGTY

SEQ ID NO: 4108 - protein, 8 aa, Artificial Sequence
  Description of Artificial Sequence: Synthetic peptide
VLDVGDAY

SEQ ID NO: 4109 - protein, 10 aa, Artificial Sequence
  Description of Artificial Sequence: Synthetic peptide
ITMGPGKVYY

SEQ ID NO: 4110 - protein, 10 aa, Artificial Sequence
  Description of Artificial Sequence: Synthetic peptide
LSALVEMGHY

SEQ ID NO: 4111 - protein, 10 aa, Artificial Sequence
  Description of Artificial Sequence: Synthetic peptide
VTVLDVGDAY

SEQ ID NO: 4112 - protein, 9 aa, Artificial Sequence
  Description of Artificial Sequence: Synthetic peptide
PTDPNPQEV

SEQ ID NO: 4113 - protein, 9 aa, Artificial Sequence
  Description of Artificial Sequence: Synthetic peptide
GSEELRSLY

SEQ ID NO: 4114 - protein, 9 aa, Artificial Sequence
  Description of Artificial Sequence: Synthetic peptide
VLAEAMSQV

SEQ ID NO: 4115 - protein, 9 aa, Artificial Sequence
  Description of Artificial Sequence: Synthetic peptide
SLYNTVATL

SEQ ID NO: 4116 - protein, 9 aa, Artificial Sequence
  Description of Artificial Sequence: Synthetic peptide
GLADQLIHL

SEQ ID NO: 4117 - protein, 9 aa, Artificial Sequence
  Description of Artificial Sequence: Synthetic peptide
ALVEICTEL

SEQ ID NO: 4118 - protein, 9 aa, Artificial Sequence
  Description of Artificial Sequence: Synthetic peptide
ILKEPVHGV

SEQ ID NO: 4119 - protein, 9 aa, Artificial Sequence
  Description of Artificial Sequence: Synthetic peptide
SLFNTVATL

SEQ ID NO: 4120 - protein, 9 aa, Artificial Sequence
  Description of Artificial Sequence: Synthetic peptide
SLFNTIATL

SEQ ID NO: 4121 - protein, 9 aa, Artificial Sequence
  Description of Artificial Sequence: Synthetic peptide
ILGQLQPSL

SEQ ID NO: 4122 - protein, 9 aa, Artificial Sequence
  Description of Artificial Sequence: Synthetic peptide
QLTEAVQKI

SEQ ID NO: 4123 - protein, 9 aa, Artificial Sequence
  Description of Artificial Sequence: Synthetic peptide
ILGQLQPAL

SEQ ID NO: 4124 - protein, 10 aa, Artificial Sequence
  Description of Artificial Sequence: Synthetic peptide
ALNPGLLETA

SEQ ID NO: 4125 - protein, 9 aa, Artificial Sequence
  Description of Artificial Sequence: Synthetic peptide
ALTEIVPLT

SEQ ID NO: 4126 - protein, 9 aa, Artificial Sequence
  Description of Artificial Sequence: Synthetic peptide
ILKETVHGV

SEQ ID NO: 4127 - protein, 9 aa, Artificial Sequence
  Description of Artificial Sequence: Synthetic peptide
AVLSIVNRV

SEQ ID NO: 4128 - protein, 9 aa, Artificial Sequence
  Description of Artificial Sequence: Synthetic peptide
ALAEICAEM

SEQ ID NO: 4129 - protein, 9 aa, Artificial Sequence
  Description of Artificial Sequence: Synthetic peptide
ALTEVVPLT

SEQ ID NO: 4130 - protein, 10 aa, Artificial Sequence
  Description of Artificial Sequence: Synthetic peptide
KLVPVDPDQV

SEQ ID NO: 4131 - protein, 9 aa, Artificial Sequence
  Description of Artificial Sequence: Synthetic peptide
ALVEMGVEM

SEQ ID NO: 4132 - protein, 9 aa, Artificial Sequence
  Description of Artificial Sequence: Synthetic peptide
PQDSQTHQV

SEQ ID NO: 4133 - protein, 9 aa, Artificial Sequence
  Description of Artificial Sequence: Synthetic peptide
YTAFTIPSV

SEQ ID NO: 4134 - protein, 9 aa, Artificial Sequence
  Description of Artificial Sequence: Synthetic peptide
IVTDSQYAL

SEQ ID NO: 4135 - protein, 9 aa, Artificial Sequence
  Description of Artificial Sequence: Synthetic peptide
VLAEAMSQV

SEQ ID NO: 4136 - protein, 9 aa, Artificial Sequence
  Description of Artificial Sequence: Synthetic peptide
ILKETVHGV

SEQ ID NO: 4137 - protein, 9 aa, Artificial Sequence
  Description of Artificial Sequence: Synthetic peptide
ILKEPVHGV

SEQ ID NO: 4138 - protein, 9 aa, Artificial Sequence
  Description of Artificial Sequence: Synthetic peptide
SLYNTVATL

SEQ ID NO: 4139 - protein, 9 aa, Artificial Sequence
  Description of Artificial Sequence: Synthetic peptide
VVKIEPLGV

SEQ ID NO: 4140 - protein, 9 aa, Artificial Sequence
  Description of Artificial Sequence: Synthetic peptide
SLFNTVATL

SEQ ID NO: 4141 - protein, 9 aa, Artificial Sequence
  Description of Artificial Sequence: Synthetic peptide
SLFNTIATL

SEQ ID NO: 4142 - protein, 9 aa, Artificial Sequence
  Description of Artificial Sequence: Synthetic peptide
TLNAWVKVV

SEQ ID NO: 4143 - protein, 10 aa, Artificial Sequence
  Description of Artificial Sequence: Synthetic peptide
ALNPGLLETA

SEQ ID NO: 4144 - protein, 9 aa, Artificial Sequence
  Description of Artificial Sequence: Synthetic peptide
QLQARILAV

SEQ ID NO: 4145 - protein, 10 aa, Artificial Sequence
  Description of Artificial Sequence: Synthetic peptide
YLKDQQLLGI

SEQ ID NO: 4146 - protein, 9 aa, Artificial Sequence
  Description of Artificial Sequence: Synthetic peptide
KIKPPLPSV

SEQ ID NO: 4147 - protein, 9 aa, Artificial Sequence
  Description of Artificial Sequence: Synthetic peptide
RVIEVLQRV

SEQ ID NO: 4148 - protein, 9 aa, Artificial Sequence
  Description of Artificial Sequence: Synthetic peptide
ALFYKLDVV

SEQ ID NO: 4149 - protein, 9 aa, Artificial Sequence
  Description of Artificial Sequence: Synthetic peptide
ALIRILQQL

SEQ ID NO: 4150 - protein, 9 aa, Artificial Sequence
  Description of Artificial Sequence: Synthetic peptide
ELKSLFNTV

SEQ ID NO: 4151 - protein, 9 aa, Artificial Sequence
  Description of Artificial Sequence: Synthetic peptide
QLQARVLAV

SEQ ID NO: 4152 - protein, 11 aa, Artificial Sequence
  Description of Artificial Sequence: Synthetic peptide
FLKEKGGLEGL

SEQ ID NO: 4153 - protein, 9 aa, Artificial Sequence
  Description of Artificial Sequence: Synthetic peptide
ALNPGLLET

SEQ ID NO: 4154 - protein, 9 aa, Artificial Sequence
  Description of Artificial Sequence: Synthetic peptide
AVLSIVNRV

SEQ ID NO: 4155 - protein, 9 aa, Artificial Sequence
  Description of Artificial Sequence: Synthetic peptide
QLTEAVQKI

SEQ ID NO: 4156 - protein, 9 aa, Artificial Sequence
  Description of Artificial Sequence: Synthetic peptide
GLADQLIHL

SEQ ID NO: 4157 - protein, 9 aa, Artificial Sequence
  Description of Artificial Sequence: Synthetic peptide
TLKQIASKL

SEQ ID NO: 4158 - protein, 10 aa, Artificial Sequence
  Description of Artificial Sequence: Synthetic peptide
ALIWDDLRSL

SEQ ID NO: 4159 - protein, 9 aa, Artificial Sequence
  Description of Artificial Sequence: Synthetic peptide
GAASVTLTV

SEQ ID NO: 4160 - protein, 9 aa, Artificial Sequence
  Description of Artificial Sequence: Synthetic peptide
ALVEICTEL

SEQ ID NO: 4161 - protein, 9 aa, Artificial Sequence
  Description of Artificial Sequence: Synthetic peptide
TLNQIVGKL

SEQ ID NO: 4162 - protein, 9 aa, Artificial Sequence
  Description of Artificial Sequence: Synthetic peptide
ELKKIIGQV

SEQ ID NO: 4163 - protein, 8 aa, Artificial Sequence
  Description of Artificial Sequence: Synthetic peptide
VLSIVNRV

SEQ ID NO: 4164 - protein, 9 aa, Artificial Sequence
  Description of Artificial Sequence: Synthetic peptide
TVLSIVNRV

SEQ ID NO: 4165 - protein, 10 aa, Artificial Sequence
  Description of Artificial Sequence: Synthetic peptide
ALTEIVPLTA

SEQ ID NO: 4166 - protein, 10 aa, Artificial Sequence
  Description of Artificial Sequence: Synthetic peptide
KVVKIEPLGV

SEQ ID NO: 4167 - protein, 9 aa, Artificial Sequence
  Description of Artificial Sequence: Synthetic peptide
QIIGDIRQA

SEQ ID NO: 4168 - protein, 9 aa, Artificial Sequence
  Description of Artificial Sequence: Synthetic peptide
ALFLGFLGA

SEQ ID NO: 4169 - protein, 10 aa, Artificial Sequence
  Description of Artificial Sequence: Synthetic peptide
ALFLGFLGAA

SEQ ID NO: 4170 - protein, 9 aa, Artificial Sequence
  Description of Artificial Sequence: Synthetic peptide
VVAGIIAIV

SEQ ID NO: 4171 - protein, 9 aa, Artificial Sequence
  Description of Artificial Sequence: Synthetic peptide
IVLSIVNRV

SEQ ID NO: 4172 - protein, 9 aa, Artificial Sequence
  Description of Artificial Sequence: Synthetic peptide
LLNATAIAV

SEQ ID NO: 4173 - protein, 9 aa, Artificial Sequence
  Description of Artificial Sequence: Synthetic peptide
RVIEVVQGA

SEQ ID NO: 4174 - protein, 9 aa, Artificial Sequence
  Description of Artificial Sequence: Synthetic peptide
SLYNTIAVL

SEQ ID NO: 4175 - protein, 10 aa, Artificial Sequence
  Description of Artificial Sequence: Synthetic peptide
VLIGPTPVNI

SEQ ID NO: 4176 - protein, 9 aa, Artificial Sequence
  Description of Artificial Sequence: Synthetic peptide
TIVAIVALV

SEQ ID NO: 4177 - protein, 10 aa, Artificial Sequence
  Description of Artificial Sequence: Synthetic peptide
KLVSTGIRKV

SEQ ID NO: 4178 - protein, 9 aa, Artificial Sequence
  Description of Artificial Sequence: Synthetic peptide
LLQYWIQEL

SEQ ID NO: 4179 - protein, 9 aa, Artificial Sequence
  Description of Artificial Sequence: Synthetic peptide
GLADQLIHL

SEQ ID NO: 4180 - protein, 9 aa, Artificial Sequence
  Description of Artificial Sequence: Synthetic peptide
SLFNTIATL

SEQ ID NO: 4181 - protein, 9 aa, Artificial Sequence
  Description of Artificial Sequence: Synthetic peptide
SITNWLWYI

SEQ ID NO: 4182 - protein, 9 aa, Artificial Sequence
  Description of Artificial Sequence: Synthetic peptide
SLFNTVATL

SEQ ID NO: 4183 - protein, 9 aa, Artificial Sequence
  Description of Artificial Sequence: Synthetic peptide
SLYNTVATL

SEQ ID NO: 4184 - protein, 10 aa, Artificial Sequence
  Description of Artificial Sequence: Synthetic peptide
NLLQYWIQEL

SEQ ID NO: 4185 - protein, 9 aa, Artificial Sequence
  Description of Artificial Sequence: Synthetic peptide
ALIRILQQL

SEQ ID NO: 4186 - protein, 9 aa, Artificial Sequence
  Description of Artificial Sequence: Synthetic peptide
TLNAWVKVV

SEQ ID NO: 4187 - protein, 9 aa, Artificial Sequence
  Description of Artificial Sequence: Synthetic peptide
AVLSIVNRV

SEQ ID NO: 4188 - protein, 9 aa, Artificial Sequence
  Description of Artificial Sequence: Synthetic peptide
ILKETVHGV

SEQ ID NO: 4189 - protein, 9 aa, Artificial Sequence
  Description of Artificial Sequence: Synthetic peptide
TVLSIVNRV

SEQ ID NO: 4190 - protein, 9 aa, Artificial Sequence
  Description of Artificial Sequence: Synthetic peptide
IVLSIVNRV

SEQ ID NO: 4191 - protein, 9 aa, Artificial Sequence
  Description of Artificial Sequence: Synthetic peptide
ILKEPVHGV

SEQ ID NO: 4192 - protein, 9 aa, Artificial Sequence
  Description of Artificial Sequence: Synthetic peptide
RVIEVLQRV

SEQ ID NO: 4193 - protein, 9 aa, Artificial Sequence
  Description of Artificial Sequence: Synthetic peptide
ILAIVVWSI

SEQ ID NO: 4194 - protein, 9 aa, Artificial Sequence
  Description of Artificial Sequence: Synthetic peptide
SLYNTIAVL

SEQ ID NO: 4195 - protein, 9 aa, Artificial Sequence
  Description of Artificial Sequence: Synthetic peptide
IVSQIIEQL

SEQ ID NO: 4196 - protein, 9 aa, Artificial Sequence
  Description of Artificial Sequence: Synthetic peptide
NITNWLWYI

SEQ ID NO: 4197 - protein, 9 aa, Artificial Sequence
  Description of Artificial Sequence: Synthetic peptide
ILGQLQPSL

SEQ ID NO: 4198 - protein, 10 aa, Artificial Sequence
  Description of Artificial Sequence: Synthetic peptide
ALIWDDLRSL

SEQ ID NO: 4199 - protein, 9 aa, Artificial Sequence
  Description of Artificial Sequence: Synthetic peptide
ALVEICTEL

SEQ ID NO: 4200 - protein, 9 aa, Artificial Sequence
  Description of Artificial Sequence: Synthetic peptide
LLQYWSQEL

SEQ ID NO: 4201 - protein, 9 aa, Artificial Sequence
  Description of Artificial Sequence: Synthetic peptide
ILGQLQPAL

SEQ ID NO: 4202 - protein, 9 aa, Artificial Sequence
  Description of Artificial Sequence: Synthetic peptide
TLNAWVKVI

SEQ ID NO: 4203 - protein, 9 aa, Artificial Sequence
  Description of Artificial Sequence: Synthetic peptide
LLWRWGIML

SEQ ID NO: 4204 - protein, 9 aa, Artificial Sequence
  Description of Artificial Sequence: Synthetic peptide
LIWDDLRSL

SEQ ID NO: 4205 - protein, 10 aa, Artificial Sequence
  Description of Artificial Sequence: Synthetic peptide
TLWQRPLVTI

SEQ ID NO: 4206 - protein, 9 aa, Artificial Sequence
  Description of Artificial Sequence: Synthetic peptide
AILHIPVRI

SEQ ID NO: 4207 - protein, 9 aa, Artificial Sequence
  Description of Artificial Sequence: Synthetic peptide
LVNQIIEQL

SEQ ID NO: 4208 - protein, 9 aa, Artificial Sequence
  Description of Artificial Sequence: Synthetic peptide
LVSQIIEQL

SEQ ID NO: 4209 - protein, 9 aa, Artificial Sequence
  Description of Artificial Sequence: Synthetic peptide
RLIDRLIER

SEQ ID NO: 4210 - protein, 9 aa, Artificial Sequence
  Description of Artificial Sequence: Synthetic peptide
LLGQLQPSL

SEQ ID NO: 4211 - protein, 9 aa, Artificial Sequence
  Description of Artificial Sequence: Synthetic peptide
LIVTRIVEL

SEQ ID NO: 4212 - protein, 9 aa, Artificial Sequence
  Description of Artificial Sequence: Synthetic peptide
TLNQIVGKL

SEQ ID NO: 4213 - protein, 9 aa, Artificial Sequence
  Description of Artificial Sequence: Synthetic peptide
KIKPPLPSV

SEQ ID NO: 4214 - protein, 9 aa, Artificial Sequence
  Description of Artificial Sequence: Synthetic peptide
ALFYKLDVV

SEQ ID NO: 4215 - protein, 9 aa, Artificial Sequence
  Description of Artificial Sequence: Synthetic peptide
HLWRWGILL

SEQ ID NO: 4216 - protein, 9 aa, Artificial Sequence
  Description of Artificial Sequence: Synthetic peptide
RLIDRIIER

SEQ ID NO: 4217 - protein, 9 aa, Artificial Sequence
  Description of Artificial Sequence: Synthetic peptide
HLEGKIILV

SEQ ID NO: 4218 - protein, 9 aa, Artificial Sequence
  Description of Artificial Sequence: Synthetic peptide
ALTEVIPLT

SEQ ID NO: 4219 - protein, 9 aa, Artificial Sequence
  Description of Artificial Sequence: Synthetic peptide
AILNIPTRI

SEQ ID NO: 4220 - protein, 9 aa, Artificial Sequence
  Description of Artificial Sequence: Synthetic peptide
QLQARILAV

SEQ ID NO: 4221 - protein, 9 aa, Artificial Sequence
  Description of Artificial Sequence: Synthetic peptide
ALTEIVPLT

SEQ ID NO: 4222 - protein, 9 aa, Artificial Sequence
  Description of Artificial Sequence: Synthetic peptide
LLNATAIAV

SEQ ID NO: 4223 - protein, 9 aa, Artificial Sequence
  Description of Artificial Sequence: Synthetic peptide
ILVESPTVL

SEQ ID NO: 4224 - protein, 9 aa, Artificial Sequence
  Description of Artificial Sequence: Synthetic peptide
TVLSIMNRV

SEQ ID NO: 4225 - protein, 9 aa, Artificial Sequence
  Description of Artificial Sequence: Synthetic peptide
VLAEAMSQV

SEQ ID NO: 4226 - protein, 9 aa, Artificial Sequence
  Description of Artificial Sequence: Synthetic peptide
FLAIIWVDL

SEQ ID NO: 4227 - protein, 9 aa, Artificial Sequence
  Description of Artificial Sequence: Synthetic peptide
FLAIFWVDL

SEQ ID NO: 4228 - protein, 9 aa, Artificial Sequence
  Description of Artificial Sequence: Synthetic peptide
ALTEVVPLT

SEQ ID NO: 4229 - protein, 9 aa, Artificial Sequence
  Description of Artificial Sequence: Synthetic peptide
IIAIVVWTI

SEQ ID NO: 4230 - protein, 10 aa, Artificial Sequence
  Description of Artificial Sequence: Synthetic peptide
TLWQRPIVTI

SEQ ID NO: 4231 - protein, 10 aa, Artificial Sequence
  Description of Artificial Sequence: Synthetic peptide
NLLQYWSQEL

SEQ ID NO: 4232 - protein, 9 aa, Artificial Sequence
  Description of Artificial Sequence: Synthetic peptide
LVSQIIEEL

SEQ ID NO: 4233 - protein, 9 aa, Artificial Sequence
  Description of Artificial Sequence: Synthetic peptide
LIVVRIVEL

SEQ ID NO: 4234 - protein, 9 aa, Artificial Sequence
  Description of Artificial Sequence: Synthetic peptide
IVTDSQYAL

SEQ ID NO: 4235 - protein, 10 aa, Artificial Sequence
  Description of Artificial Sequence: Synthetic peptide
ALNPGLLETA

SEQ ID NO: 4236 - protein, 10 aa, Artificial Sequence
  Description of Artificial Sequence: Synthetic peptide
GLVGLRIVFI

SEQ ID NO: 4237 - protein, 9 aa, Artificial Sequence
  Description of Artificial Sequence: Synthetic peptide
HLEGKVILV

SEQ ID NO: 4238 - protein, 11 aa, Artificial Sequence
  Description of Artificial Sequence: Synthetic peptide
FLKEKGGLEGL

SEQ ID NO: 4239 - protein, 9 aa, Artificial Sequence
  Description of Artificial Sequence: Synthetic peptide
LLLIVTRTL

SEQ ID NO: 4240 - protein, 10 aa, Artificial Sequence
  Description of Artificial Sequence: Synthetic peptide
VLIGPTPVNI

SEQ ID NO: 4241 - protein, 9 aa, Artificial Sequence
  Description of Artificial Sequence: Synthetic peptide
TLGQIVKKL

SEQ ID NO: 4242 - protein, 9 aa, Artificial Sequence
  Description of Artificial Sequence: Synthetic peptide
YQLEKEPIV

SEQ ID NO: 4243 - protein, 9 aa, Artificial Sequence
  Description of Artificial Sequence: Synthetic peptide
ALNPGLLET

SEQ ID NO: 4244 - protein, 10 aa, Artificial Sequence
  Description of Artificial Sequence: Synthetic peptide
LLIVTRIVEL

SEQ ID NO: 4245 - protein, 9 aa, Artificial Sequence
  Description of Artificial Sequence: Synthetic peptide
YILGIVALV

SEQ ID NO: 4246 - protein, 9 aa, Artificial Sequence
  Description of Artificial Sequence: Synthetic peptide
LLQLTVWGI

SEQ ID NO: 4247 - protein, 9 aa, Artificial Sequence
  Description of Artificial Sequence: Synthetic peptide
AIIRILQQL

SEQ ID NO: 4248 - protein, 10 aa, Artificial Sequence
  Description of Artificial Sequence: Synthetic peptide
LLIVVRIVEL

SEQ ID NO: 4249 - protein, 9 aa, Artificial Sequence
  Description of Artificial Sequence: Synthetic peptide
GALDLSHFL

SEQ ID NO: 4250 - protein, 11 aa, Artificial Sequence
  Description of Artificial Sequence: Synthetic peptide
VQLGIPHPAGL

SEQ ID NO: 4251 - protein, 9 aa, Artificial Sequence
  Description of Artificial Sequence: Synthetic peptide
NYTSLIHSL

SEQ ID NO: 4252 - protein, 9 aa, Artificial Sequence
  Description of Artificial Sequence: Synthetic peptide
YSTQVDPEL

SEQ ID NO: 4253 - protein, 10 aa, Artificial Sequence
  Description of Artificial Sequence: Synthetic peptide
RTQDFWEVQL

SEQ ID NO: 4254 - protein, 9 aa, Artificial Sequence
  Description of Artificial Sequence: Synthetic peptide
TVSFNFPQV

SEQ ID NO: 4255 - protein, 10 aa, Artificial Sequence
  Description of Artificial Sequence: Synthetic peptide
YLQDQQLLGI

SEQ ID NO: 4256 - protein, 11 aa, Artificial Sequence
  Description of Artificial Sequence: Synthetic peptide
SLLHPVSLHGM

SEQ ID NO: 4257 - protein, 9 aa, Artificial Sequence
  Description of Artificial Sequence: Synthetic peptide
TLQEQITWM

SEQ ID NO: 4258 - protein, 10 aa, Artificial Sequence
  Description of Artificial Sequence: Synthetic peptide
IMIVGGLVGL

SEQ ID NO: 4259 - protein, 9 aa, Artificial Sequence
  Description of Artificial Sequence: Synthetic peptide
ALLSKLDIV

SEQ ID NO: 4260 - protein, 9 aa, Artificial Sequence
  Description of Artificial Sequence: Synthetic peptide
KLTPLCVTL

SEQ ID NO: 4261 - protein, 9 aa, Artificial Sequence
  Description of Artificial Sequence: Synthetic peptide
NTKTIIVQL

SEQ ID NO: 4262 - protein, 9 aa, Artificial Sequence
  Description of Artificial Sequence: Synthetic peptide
RVIEVVQGA

SEQ ID NO: 4263 - protein, 9 aa, Artificial Sequence
  Description of Artificial Sequence: Synthetic peptide
RVIETIQRA

SEQ ID NO: 4264 - protein, 9 aa, Artificial Sequence
  Description of Artificial Sequence: Synthetic peptide
IVSQIIEQL

SEQ ID NO: 4265 - protein, 9 aa, Artificial Sequence
  Description of Artificial Sequence: Synthetic peptide
QIIGDIRQA

SEQ ID NO: 4266 - protein, 9 aa, Artificial Sequence
  Description of Artificial Sequence: Synthetic peptide
RVIEVLQRV

SEQ ID NO: 4267 - protein, 9 aa, Artificial Sequence
  Description of Artificial Sequence: Synthetic peptide
LVSQIIEQL

SEQ ID NO: 4268 - protein, 9 aa, Artificial Sequence
  Description of Artificial Sequence: Synthetic peptide
AAVDLSHFL

SEQ ID NO: 4269 - protein, 11 aa, Artificial Sequence
  Description of Artificial Sequence: Synthetic peptide
TQVDPELADQL

SEQ ID NO: 4270 - protein, 9 aa, Artificial Sequence
  Description of Artificial Sequence: Synthetic peptide
VLAEAMSQV

SEQ ID NO: 4271 - protein, 9 aa, Artificial Sequence
  Description of Artificial Sequence: Synthetic peptide
LVSQIIEEL

SEQ ID NO: 4272 - protein, 9 aa, Artificial Sequence
  Description of Artificial Sequence: Synthetic peptide
TVLSIVNRV

SEQ ID NO: 4273 - protein, 11 aa, Artificial Sequence
  Description of Artificial Sequence: Synthetic peptide
TQVDPDLADQL

SEQ ID NO: 4274 - protein, 9 aa, Artificial Sequence
  Description of Artificial Sequence: Synthetic peptide
AVAEGTDRV

SEQ ID NO: 4275 - protein, 11 aa, Artificial Sequence
  Description of Artificial Sequence: Synthetic peptide
TQVDPGLADQL

SEQ ID NO: 4276 - protein, 9 aa, Artificial Sequence
  Description of Artificial Sequence: Synthetic peptide
AEWDRIHPA

SEQ ID NO: 4277 - protein, 9 aa, Artificial Sequence
  Description of Artificial Sequence: Synthetic peptide
AVLSIVNRV

SEQ ID NO: 4278 - protein, 11 aa, Artificial Sequence
  Description of Artificial Sequence: Synthetic peptide
VVIQDNSDIKV

SEQ ID NO: 4279 - protein, 9 aa, Artificial Sequence
  Description of Artificial Sequence: Synthetic peptide
IEIKDTKEA

SEQ ID NO: 4280 - protein, 9 aa, Artificial Sequence
  Description of Artificial Sequence: Synthetic peptide
VTIGKIGNM

SEQ ID NO: 4281 - protein, 9 aa, Artificial Sequence
  Description of Artificial Sequence: Synthetic peptide
ALVEICTEL

SEQ ID NO: 4282 - protein, 10 aa, Artificial Sequence
  Description of Artificial Sequence: Synthetic peptide
QVWGGDNNSL

SEQ ID NO: 4283 - protein, 10 aa, Artificial Sequence
  Description of Artificial Sequence: Synthetic peptide
GEIIGDIRQA

SEQ ID NO: 4284 - protein, 9 aa, Artificial Sequence
  Description of Artificial Sequence: Synthetic peptide
WTVNDIQKL

SEQ ID NO: 4285 - protein, 9 aa, Artificial Sequence
  Description of Artificial Sequence: Synthetic peptide
ATLEEMMTA

SEQ ID NO: 4286 - protein, 9 aa, Artificial Sequence
  Description of Artificial Sequence: Synthetic peptide
IVTDSQYAL

SEQ ID NO: 4287 - protein, 9 aa, Artificial Sequence
  Description of Artificial Sequence: Synthetic peptide
EIIGDIRQA

SEQ ID NO: 4288 - protein, 9 aa, Artificial Sequence
  Description of Artificial Sequence: Synthetic peptide
SAVSLFNAI

SEQ ID NO: 4289 - protein, 10 aa, Artificial Sequence
  Description of Artificial Sequence: Synthetic peptide
AEAMSQVTSA

SEQ ID NO: 4290 - protein, 9 aa, Artificial Sequence
  Description of Artificial Sequence: Synthetic peptide
VVAGIIAIV

SEQ ID NO: 4291 - protein, 9 aa, Artificial Sequence
  Description of Artificial Sequence: Synthetic peptide
RETETHPDA

SEQ ID NO: 4292 - protein, 9 aa, Artificial Sequence
  Description of Artificial Sequence: Synthetic peptide
SQVTNSATI

SEQ ID NO: 4293 - protein, 9 aa, Artificial Sequence
  Description of Artificial Sequence: Synthetic peptide
SLFNTVATL

SEQ ID NO: 4294 - protein, 10 aa, Artificial Sequence
  Description of Artificial Sequence: Synthetic peptide
GQIIGDIRQA

SEQ ID NO: 4295 - protein, 9 aa, Artificial Sequence
  Description of Artificial Sequence: Synthetic peptide
NTKTIIVQL

SEQ ID NO: 4296 - protein, 9 aa, Artificial Sequence
  Description of Artificial Sequence: Synthetic peptide
LVNQIIEQL

SEQ ID NO: 4297 - protein, 9 aa, Artificial Sequence
  Description of Artificial Sequence: Synthetic peptide
ALAEICAEM

SEQ ID NO: 4298 - protein, 10 aa, Artificial Sequence
  Description of Artificial Sequence: Synthetic peptide
SQYALGIIQA

SEQ ID NO: 4299 - protein, 9 aa, Artificial Sequence
  Description of Artificial Sequence: Synthetic peptide
LEKEPIVGA

SEQ ID NO: 4300 - protein, 9 aa, Artificial Sequence
  Description of Artificial Sequence: Synthetic peptide
SLFNTIATL

SEQ ID NO: 4301 - protein, 10 aa, Artificial Sequence
  Description of Artificial Sequence: Synthetic peptide
REFSSEQTRA

SEQ ID NO: 4302 - protein, 9 aa, Artificial Sequence
  Description of Artificial Sequence: Synthetic peptide
SQIYAGIKV

SEQ ID NO: 4303 - protein, 9 aa, Artificial Sequence
  Description of Artificial Sequence: Synthetic peptide
RAIEAQQHL

SEQ ID NO: 4304 - protein, 9 aa, Artificial Sequence
  Description of Artificial Sequence: Synthetic peptide
RVIEIVQRT

SEQ ID NO: 4305 - protein, 9 aa, Artificial Sequence
  Description of Artificial Sequence: Synthetic peptide
QLTEAVQKI

SEQ ID NO: 4306 - protein, 9 aa, Artificial Sequence
  Description of Artificial Sequence: Synthetic peptide
GEVGFPVKP

SEQ ID NO: 4307 - protein, 9 aa, Artificial Sequence
  Description of Artificial Sequence: Synthetic peptide
SQIYPGIKV

SEQ ID NO: 4308 - protein, 9 aa, Artificial Sequence
  Description of Artificial Sequence: Synthetic peptide
SLYNTVATL

SEQ ID NO: 4309 - protein, 9 aa, Artificial Sequence
  Description of Artificial Sequence: Synthetic peptide
TETLLVQNA

SEQ ID NO: 4310 - protein, 9 aa, Artificial Sequence
  Description of Artificial Sequence: Synthetic peptide
ASVTLTVQA

SEQ ID NO: 4311 - protein, 9 aa, Artificial Sequence
  Description of Artificial Sequence: Synthetic peptide
IEVKDTKEA

SEQ ID NO: 4312 - protein, 9 aa, Artificial Sequence
  Description of Artificial Sequence: Synthetic peptide
GAASVTLTV

SEQ ID NO: 4313 - protein, 9 aa, Artificial Sequence
  Description of Artificial Sequence: Synthetic peptide
MIVGGLVGL

SEQ ID NO: 4314 - protein, 9 aa, Artificial Sequence
  Description of Artificial Sequence: Synthetic peptide
YSTQVDPEL

SEQ ID NO: 4315 - protein, 9 aa, Artificial Sequence
  Description of Artificial Sequence: Synthetic peptide
NAKTIIVQL

SEQ ID NO: 4316 - protein, 9 aa, Artificial Sequence
  Description of Artificial Sequence: Synthetic peptide
EVIPLTEEA

SEQ ID NO: 4317 - protein, 10 aa, Artificial Sequence
  Description of Artificial Sequence: Synthetic peptide
KAYDTEVHNV

SEQ ID NO: 4318 - protein, 9 aa, Artificial Sequence
  Description of Artificial Sequence: Synthetic peptide
ILKEPVHGV

SEQ ID NO: 4319 - protein, 9 aa, Artificial Sequence
  Description of Artificial Sequence: Synthetic peptide
RVIEVVQGA

SEQ ID NO: 4320 - protein, 9 aa, Artificial Sequence
  Description of Artificial Sequence: Synthetic peptide
RVIEVLQRV

SEQ ID NO: 4321 - protein, 9 aa, Artificial Sequence
  Description of Artificial Sequence: Synthetic peptide
YSTQVDPEL

SEQ ID NO: 4322 - protein, 9 aa, Artificial Sequence
  Description of Artificial Sequence: Synthetic peptide
IVTDSQYAL

SEQ ID NO: 4323 - protein, 9 aa, Artificial Sequence
  Description of Artificial Sequence: Synthetic peptide
IQDNSDIKV

SEQ ID NO: 4324 - protein, 11 aa, Artificial Sequence
  Description of Artificial Sequence: Synthetic peptide
VVIQDNSDIKV

SEQ ID NO: 4325 - protein, 9 aa, Artificial Sequence
  Description of Artificial Sequence: Synthetic peptide
YTTQVDPDL

SEQ ID NO: 4326 - protein, 9 aa, Artificial Sequence
  Description of Artificial Sequence: Synthetic peptide
AVLSIVNRV

SEQ ID NO: 4327 - protein, 9 aa, Artificial Sequence
  Description of Artificial Sequence: Synthetic peptide
RVIETIQRA

SEQ ID NO: 4328 - protein, 9 aa, Artificial Sequence
  Description of Artificial Sequence: Synthetic peptide
AAVDLSHFL

SEQ ID NO: 4329 - protein, 9 aa, Artificial Sequence
  Description of Artificial Sequence: Synthetic peptide
VLAEAMSQV

SEQ ID NO: 4330 - protein, 9 aa, Artificial Sequence
  Description of Artificial Sequence: Synthetic peptide
SQIYAGIKV

SEQ ID NO: 4331 - protein, 9 aa, Artificial Sequence
  Description of Artificial Sequence: Synthetic peptide
IQDKSDIKV

SEQ ID NO: 4332 - protein, 9 aa, Artificial Sequence
  Description of Artificial Sequence: Synthetic peptide
SAVSLFNAI

SEQ ID NO: 4333 - protein, 11 aa, Artificial Sequence
  Description of Artificial Sequence: Synthetic peptide
TQVDPELADQL

SEQ ID NO: 4334 - protein, 9 aa, Artificial Sequence
  Description of Artificial Sequence: Synthetic peptide
ALVEICTEL

SEQ ID NO: 4335 - protein, 11 aa, Artificial Sequence
  Description of Artificial Sequence: Synthetic peptide
TQVDPGLADQL

SEQ ID NO: 4336 - protein, 9 aa, Artificial Sequence
  Description of Artificial Sequence: Synthetic peptide
GGIGGFIKV

SEQ ID NO: 4337 - protein, 9 aa, Artificial Sequence
  Description of Artificial Sequence: Synthetic peptide
SQIYPGIKV

SEQ ID NO: 4338 - protein, 9 aa, Artificial Sequence
  Description of Artificial Sequence: Synthetic peptide
YSTQVDPDL

SEQ ID NO: 4339 - protein, 9 aa, Artificial Sequence
  Description of Artificial Sequence: Synthetic peptide
TVLSIVNRV

SEQ ID NO: 4340 - protein, 9 aa, Artificial Sequence
  Description of Artificial Sequence: Synthetic peptide
QIIGDIRQA

SEQ ID NO: 4341 - protein, 9 aa, Artificial Sequence
  Description of Artificial Sequence: Synthetic peptide
SQVTSAPAI

SEQ ID NO: 4342 - protein, 10 aa, Artificial Sequence
  Description of Artificial Sequence: Synthetic peptide
TVLDVGDAYF

SEQ ID NO: 4343 - protein, 9 aa, Artificial Sequence
  Description of Artificial Sequence: Synthetic peptide
TVSFNFPQV

SEQ ID NO: 4344 - protein, 9 aa, Artificial Sequence
  Description of Artificial Sequence: Synthetic peptide
IVSQIIEQL

SEQ ID NO: 4345 - protein, 9 aa, Artificial Sequence
  Description of Artificial Sequence: Synthetic peptide
GAASVTLTV

SEQ ID NO: 4346 - protein, 11 aa, Artificial Sequence
  Description of Artificial Sequence: Synthetic peptide
TQVDPDLADQL

SEQ ID NO: 4347 - protein, 9 aa, Artificial Sequence
  Description of Artificial Sequence: Synthetic peptide
ALVEMGVEM

SEQ ID NO: 4348 - protein, 9 aa, Artificial Sequence
  Description of Artificial Sequence: Synthetic peptide
MIVGGLVGL

SEQ ID NO: 4349 - protein, 10 aa, Artificial Sequence
  Description of Artificial Sequence: Synthetic peptide
GVVESINKEL

SEQ ID NO: 4350 - protein, 10 aa, Artificial Sequence
  Description of Artificial Sequence: Synthetic peptide
KVVKIEPLGV

SEQ ID NO: 4351 - protein, 9 aa, Artificial Sequence
  Description of Artificial Sequence: Synthetic peptide
AVAEGTDRV

SEQ ID NO: 4352 - protein, 9 aa, Artificial Sequence
  Description of Artificial Sequence: Synthetic peptide
QLTEAVQKI

SEQ ID NO: 4353 - protein, 9 aa, Artificial Sequence
  Description of Artificial Sequence: Synthetic peptide
IVLSIVNRV

SEQ ID NO: 4354 - protein, 9 aa, Artificial Sequence
  Description of Artificial Sequence: Synthetic peptide
VQLNTSVEI

SEQ ID NO: 4355 - protein, 9 aa, Artificial Sequence
  Description of Artificial Sequence: Synthetic peptide
YQLEKEPIV

SEQ ID NO: 4356 - protein, 9 aa, Artificial Sequence
  Description of Artificial Sequence: Synthetic peptide
ALTEVIPLT

SEQ ID NO: 4357 - protein, 9 aa, Artificial Sequence
  Description of Artificial Sequence: Synthetic peptide
YNTQVDPGL

SEQ ID NO: 4358 - protein, 9 aa, Artificial Sequence
  Description of Artificial Sequence: Synthetic peptide
EVIPMFAAL

SEQ ID NO: 4359 - protein, 9 aa, Artificial Sequence
  Description of Artificial Sequence: Synthetic peptide
NTIATLYCV

SEQ ID NO: 4360 - protein, 9 aa, Artificial Sequence
  Description of Artificial Sequence: Synthetic peptide
ALTEVVPLT

SEQ ID NO: 4361 - protein, 9 aa, Artificial Sequence
  Description of Artificial Sequence: Synthetic peptide
SLDEIWNNM

SEQ ID NO: 4362 - protein, 9 aa, Artificial Sequence
  Description of Artificial Sequence: Synthetic peptide
YVDRFYKTL

SEQ ID NO: 4363 - protein, 9 aa, Artificial Sequence
  Description of Artificial Sequence: Synthetic peptide
GTDRVIEVL

SEQ ID NO: 4364 - protein, 9 aa, Artificial Sequence
  Description of Artificial Sequence: Synthetic peptide
RVIEVLQRV

SEQ ID NO: 4365 - protein, 9 aa, Artificial Sequence
  Description of Artificial Sequence: Synthetic peptide
AVLSIVNRV

SEQ ID NO: 4366 - protein, 9 aa, Artificial Sequence
  Description of Artificial Sequence: Synthetic peptide
IVLSIVNRV

SEQ ID NO: 4367 - protein, 9 aa, Artificial Sequence
  Description of Artificial Sequence: Synthetic peptide
ILKEPVHGV

SEQ ID NO: 4368 - protein, 9 aa, Artificial Sequence
  Description of Artificial Sequence: Synthetic peptide
SLDQIWENM

SEQ ID NO: 4369 - protein, 11 aa, Artificial Sequence
  Description of Artificial Sequence: Synthetic peptide
YVDDLYVGSDL

SEQ ID NO: 4370 - protein, 9 aa, Artificial Sequence
  Description of Artificial Sequence: Synthetic peptide
GTDRVIEVV

SEQ ID NO: 4371 - protein, 9 aa, Artificial Sequence
  Description of Artificial Sequence: Synthetic peptide
GTDRVIETI

SEQ ID NO: 4372 - protein, 9 aa, Artificial Sequence
  Description of Artificial Sequence: Synthetic peptide
FSPEVIPMF

SEQ ID NO: 4373 - protein, 9 aa, Artificial Sequence
  Description of Artificial Sequence: Synthetic peptide
VLAEAMSQV

SEQ ID NO: 4374 - protein, 9 aa, Artificial Sequence
  Description of Artificial Sequence: Synthetic peptide
TVLSIVNRV

SEQ ID NO: 4375 - protein, 9 aa, Artificial Sequence
  Description of Artificial Sequence: Synthetic peptide
HLEGKIILV

SEQ ID NO: 4376 - protein, 9 aa, Artificial Sequence
  Description of Artificial Sequence: Synthetic peptide
KIDKIIDRI

SEQ ID NO: 4377 - protein, 9 aa, Artificial Sequence
  Description of Artificial Sequence: Synthetic peptide
ALVEICTEL

SEQ ID NO: 4378 - protein, 9 aa, Artificial Sequence
  Description of Artificial Sequence: Synthetic peptide
HLEGKVILV

SEQ ID NO: 4379 - protein, 9 aa, Artificial Sequence
  Description of Artificial Sequence: Synthetic peptide
RVIEVVQGA

SEQ ID NO: 4380 - protein, 9 aa, Artificial Sequence
  Description of Artificial Sequence: Synthetic peptide
IVSQIIEQL

SEQ ID NO: 4381 - protein, 9 aa, Artificial Sequence
  Description of Artificial Sequence: Synthetic peptide
QIIGDIRQA

SEQ ID NO: 4382 - protein, 9 aa, Artificial Sequence
  Description of Artificial Sequence: Synthetic peptide
RVIETIQRA

SEQ ID NO: 4383 - protein, 9 aa, Artificial Sequence
  Description of Artificial Sequence: Synthetic peptide
RVIEVLQRV

SEQ ID NO: 4384 - protein, 9 aa, Artificial Sequence
  Description of Artificial Sequence: Synthetic peptide
IVTRIVELL

SEQ ID NO: 4385 - protein, 10 aa, Artificial Sequence
  Description of Artificial Sequence: Synthetic peptide
KVVKIEPLGV

SEQ ID NO: 4386 - protein, 11 aa, Artificial Sequence
  Description of Artificial Sequence: Synthetic peptide
RTPQDSQTHQV

SEQ ID NO: 4387 - protein, 9 aa, Artificial Sequence
  Description of Artificial Sequence: Synthetic peptide
LVSQIIEQL

SEQ ID NO: 4388 - protein, 9 aa, Artificial Sequence
  Description of Artificial Sequence: Synthetic peptide
WTVNDIQKL

SEQ ID NO: 4389 - protein, 9 aa, Artificial Sequence
  Description of Artificial Sequence: Synthetic peptide
IEIKDTKEA

SEQ ID NO: 4390 - protein, 9 aa, Artificial Sequence
  Description of Artificial Sequence: Synthetic peptide
LEKEPIVGA

SEQ ID NO: 4391 - protein, 9 aa, Artificial Sequence
  Description of Artificial Sequence: Synthetic peptide
AIIRILQQL

SEQ ID NO: 4392 - protein, 9 aa, Artificial Sequence
  Description of Artificial Sequence: Synthetic peptide
RVIEIVQRT

SEQ ID NO: 4393 - protein, 10 aa, Artificial Sequence
  Description of Artificial Sequence: Synthetic peptide
KAYDTEVHNV

SEQ ID NO: 4394 - protein, 9 aa, Artificial Sequence
  Description of Artificial Sequence: Synthetic peptide
AVLSIVNRV

SEQ ID NO: 4395 - protein, 9 aa, Artificial Sequence
  Description of Artificial Sequence: Synthetic peptide
VTIGKIGNM

SEQ ID NO: 4396 - protein, 9 aa, Artificial Sequence
  Description of Artificial Sequence: Synthetic peptide
EIIGDIRQA

SEQ ID NO: 4397 - protein, 9 aa, Artificial Sequence
  Description of Artificial Sequence: Synthetic peptide
KIKPPLPSV

SEQ ID NO: 4398 - protein, 9 aa, Artificial Sequence
  Description of Artificial Sequence: Synthetic peptide
VLAEAMSQV

SEQ ID NO: 4399 - protein, 10 aa, Artificial Sequence
  Description of Artificial Sequence: Synthetic peptide
QVWGGDNNSL

SEQ ID NO: 4400 - protein, 10 aa, Artificial Sequence
  Description of Artificial Sequence: Synthetic peptide
GVVESINKEL

SEQ ID NO: 4401 - protein, 10 aa, Artificial Sequence
  Description of Artificial Sequence: Synthetic peptide
KAYETEVHNV

SEQ ID NO: 4402 - protein, 10 aa, Artificial Sequence
  Description of Artificial Sequence: Synthetic peptide
GQIIGDIRQA

SEQ ID NO: 4403 - protein, 10 aa, Artificial Sequence
  Description of Artificial Sequence: Synthetic peptide
GEIIGDIRQA

SEQ ID NO: 4404 - protein, 10 aa, Artificial Sequence
  Description of Artificial Sequence: Synthetic peptide
RVLAEAMSQV

SEQ ID NO: 4405 - protein, 9 aa, Artificial Sequence
  Description of Artificial Sequence: Synthetic peptide
AEWDRIHPA

SEQ ID NO: 4406 - protein, 11 aa, Artificial Sequence
  Description of Artificial Sequence: Synthetic peptide
VVIQDNSDIKV

SEQ ID NO: 4407 - protein, 9 aa, Artificial Sequence
  Description of Artificial Sequence: Synthetic peptide
LVSQIIEEL

SEQ ID NO: 4408 - protein, 9 aa, Artificial Sequence
  Description of Artificial Sequence: Synthetic peptide
KVVSLTDTT

SEQ ID NO: 4409 - protein, 9 aa, Artificial Sequence
  Description of Artificial Sequence: Synthetic peptide
KVVTLTDTT

SEQ ID NO: 4410 - protein, 9 aa, Artificial Sequence
  Description of Artificial Sequence: Synthetic peptide
NTKTIIVQL

SEQ ID NO: 4411 - protein, 9 aa, Artificial Sequence
  Description of Artificial Sequence: Synthetic peptide
IEVKDTKEA

SEQ ID NO: 4412 - protein, 9 aa, Artificial Sequence
  Description of Artificial Sequence: Synthetic peptide
IVQQQNNLL

SEQ ID NO: 4413 - protein, 9 aa, Artificial Sequence
  Description of Artificial Sequence: Synthetic peptide
GEVGFPVKP

SEQ ID NO: 4414 - protein, 9 aa, Artificial Sequence
  Description of Artificial Sequence: Synthetic peptide
VVAGIIAIV

SEQ ID NO: 4415 - protein, 9 aa, Artificial Sequence
  Description of Artificial Sequence: Synthetic peptide
IVVRIVELL

SEQ ID NO: 4416 - protein, 9 aa, Artificial Sequence
  Description of Artificial Sequence: Synthetic peptide
ILKEPVHGV

SEQ ID NO: 4417 - protein, 10 aa, Artificial Sequence
  Description of Artificial Sequence: Synthetic peptide
KTIIVQLNET

SEQ ID NO: 4418 - protein, 9 aa, Artificial Sequence
  Description of Artificial Sequence: Synthetic peptide
TVLSIVNRV

SEQ ID NO: 4419 - protein, 10 aa, Artificial Sequence
  Description of Artificial Sequence: Synthetic peptide
AEAMSQVTSA

SEQ ID NO: 4420 - protein, 10 aa, Artificial Sequence
  Description of Artificial Sequence: Synthetic peptide
RVIEVVQGAC

SEQ ID NO: 4421 - protein, 9 aa, Artificial Sequence
  Description of Artificial Sequence: Synthetic peptide
MIVGGLVGL

SEQ ID NO: 4422 - protein, 9 aa, Artificial Sequence
  Description of Artificial Sequence: Synthetic peptide
ALIRILQQL

SEQ ID NO: 4423 - protein, 9 aa, Artificial Sequence
  Description of Artificial Sequence: Synthetic peptide
VVKIEPLGV

SEQ ID NO: 4424 - protein, 9 aa, Artificial Sequence
  Description of Artificial Sequence: Synthetic peptide
QIYPGIKVK

SEQ ID NO: 4425 - protein, 9 aa, Artificial Sequence
  Description of Artificial Sequence: Synthetic peptide
ALAALITPK

SEQ ID NO: 4426 - protein, 9 aa, Artificial Sequence
  Description of Artificial Sequence: Synthetic peptide
ALAVLITPK

SEQ ID NO: 4427 - protein, 11 aa, Artificial Sequence
  Description of Artificial Sequence: Synthetic peptide
VTNSGAIMMQK

SEQ ID NO: 4428 - protein, 11 aa, Artificial Sequence
  Description of Artificial Sequence: Synthetic peptide
VTNSATIMMQK

SEQ ID NO: 4429 - protein, 9 aa, Artificial Sequence
  Description of Artificial Sequence: Synthetic peptide
AIFQSSMTK

SEQ ID NO: 4430 - protein, 9 aa, Artificial Sequence
  Description of Artificial Sequence: Synthetic peptide
QIYPGIKVR

SEQ ID NO: 4431 - protein, 9 aa, Artificial Sequence
  Description of Artificial Sequence: Synthetic peptide
AIRNAILGH

SEQ ID NO: 4432 - protein, 9 aa, Artificial Sequence
  Description of Artificial Sequence: Synthetic peptide
KLVSTGIRK

SEQ ID NO: 4433 - protein, 10 aa, Artificial Sequence
  Description of Artificial Sequence: Synthetic peptide
ALTEVVPLTK

SEQ ID NO: 4434 - protein, 9 aa, Artificial Sequence
  Description of Artificial Sequence: Synthetic peptide
QIIEQLIQK

SEQ ID NO: 4435 - protein, 10 aa, Artificial Sequence
  Description of Artificial Sequence: Synthetic peptide
TVYYGVPVWK

SEQ ID NO: 4436 - protein, 10 aa, Artificial Sequence
  Description of Artificial Sequence: Synthetic peptide
KLREQFGNNK

SEQ ID NO: 4437 - protein, 11 aa, Artificial Sequence
  Description of Artificial Sequence: Synthetic peptide
TVNDIQKLVGK

SEQ ID NO: 4438 - protein, 9 aa, Artificial Sequence
  Description of Artificial Sequence: Synthetic peptide
QTHQVSLSK

SEQ ID NO: 4439 - protein, 9 aa, Artificial Sequence
  Description of Artificial Sequence: Synthetic peptide
NSATIMMQK

SEQ ID NO: 4440 - protein, 9 aa, Artificial Sequence
  Description of Artificial Sequence: Synthetic peptide
RLIDRIIER

SEQ ID NO: 4441 - protein, 9 aa, Artificial Sequence
  Description of Artificial Sequence: Synthetic peptide
AIRNALLGH

SEQ ID NO: 4442 - protein, 9 aa, Artificial Sequence
  Description of Artificial Sequence: Synthetic peptide
SNFTSTTVK

SEQ ID NO: 4443 - protein, 9 aa, Artificial Sequence
  Description of Artificial Sequence: Synthetic peptide
GVAPTTAKR

SEQ ID NO: 4444 - protein, 9 aa, Artificial Sequence
  Description of Artificial Sequence: Synthetic peptide
ALTALRTPK

SEQ ID NO: 4445 - protein, 8 aa, Artificial Sequence
  Description of Artificial Sequence: Synthetic peptide
SATIMMQK

SEQ ID NO: 4446 - protein, 11 aa, Artificial Sequence
  Description of Artificial Sequence: Synthetic peptide
KIKPPLPSVTK

SEQ ID NO: 4447 - protein, 9 aa, Artificial Sequence
  Description of Artificial Sequence: Synthetic peptide
SVITQACPK

SEQ ID NO: 4448 - protein, 10 aa, Artificial Sequence
  Description of Artificial Sequence: Synthetic peptide
ALLGHIVSPR

SEQ ID NO: 4449 - protein, 11 aa, Artificial Sequence
  Description of Artificial Sequence: Synthetic peptide
VTNSATIMMQK

SEQ ID NO: 4450 - protein, 11 aa, Artificial Sequence
  Description of Artificial Sequence: Synthetic peptide
TVNDIQKLVGK

SEQ ID NO: 4451 - protein, 11 aa, Artificial Sequence
  Description of Artificial Sequence: Synthetic peptide
VTNSGAIMMQK

SEQ ID NO: 4452 - protein, 9 aa, Artificial Sequence
  Description of Artificial Sequence: Synthetic peptide
ALAALITPK

SEQ ID NO: 4453 - protein, 10 aa, Artificial Sequence
  Description of Artificial Sequence: Synthetic peptide
TVQPIVLPEK

SEQ ID NO: 4454 - protein, 9 aa, Artificial Sequence
  Description of Artificial Sequence: Synthetic peptide
QIYPGIKVK

SEQ ID NO: 4455 - protein, 9 aa, Artificial Sequence
  Description of Artificial Sequence: Synthetic peptide
ALAVLITPK

SEQ ID NO: 4456 - protein, 9 aa, Artificial Sequence
  Description of Artificial Sequence: Synthetic peptide
AIFQSSMTK

SEQ ID NO: 4457 - protein, 10 aa, Artificial Sequence
  Description of Artificial Sequence: Synthetic peptide
VVESINKELK

SEQ ID NO: 4458 - protein, 11 aa, Artificial Sequence
  Description of Artificial Sequence: Synthetic peptide
RVIEVVQGACR

SEQ ID NO: 4459 - protein, 11 aa, Artificial Sequence
  Description of Artificial Sequence: Synthetic peptide
KIEPLGVAPTK

SEQ ID NO: 4460 - protein, 9 aa, Artificial Sequence
  Description of Artificial Sequence: Synthetic peptide
AVDLSHFLK

SEQ ID NO: 4461 - protein, 11 aa, Artificial Sequence
  Description of Artificial Sequence: Synthetic peptide
VVSLTDTTNQK

SEQ ID NO: 4462 - protein, 9 aa, Artificial Sequence
  Description of Artificial Sequence: Synthetic peptide
QIIEQLIQK

SEQ ID NO: 4463 - protein, 9 aa, Artificial Sequence
  Description of Artificial Sequence: Synthetic peptide
SVNFTDNAK

SEQ ID NO: 4464 - protein, 10 aa, Artificial Sequence
  Description of Artificial Sequence: Synthetic peptide
ALQTGSEELK

SEQ ID NO: 4465 - protein, 9 aa, Artificial Sequence
  Description of Artificial Sequence: Synthetic peptide
SVITQACPK

SEQ ID NO: 4466 - protein, 10 aa, Artificial Sequence
  Description of Artificial Sequence: Synthetic peptide
SLQTGSEELK

SEQ ID NO: 4467 - protein, 9 aa, Artificial Sequence
  Description of Artificial Sequence: Synthetic peptide
APAGFAILK

SEQ ID NO: 4468 - protein, 10 aa, Artificial Sequence
  Description of Artificial Sequence: Synthetic peptide
GVETTTPPQK

SEQ ID NO: 4469 - protein, 11 aa, Artificial Sequence
  Description of Artificial Sequence: Synthetic peptide
SFNITTDISNK

SEQ ID NO: 4470 - protein, 10 aa, Artificial Sequence
  Description of Artificial Sequence: Synthetic peptide
GSNFTSSAVK

SEQ ID NO: 4471 - protein, 10 aa, Artificial Sequence
  Description of Artificial Sequence: Synthetic peptide
ALTEVVPLTK

SEQ ID NO: 4472 - protein, 8 aa, Artificial Sequence
  Description of Artificial Sequence: Synthetic peptide
TLNQIVGK

SEQ ID NO: 4473 - protein, 11 aa, Artificial Sequence
  Description of Artificial Sequence: Synthetic peptide
QSQGVVESMNK

SEQ ID NO: 4474 - protein, 8 aa, Artificial Sequence
  Description of Artificial Sequence: Synthetic peptide
TLGQIVKK

SEQ ID NO: 4475 - protein, 9 aa, Artificial Sequence
  Description of Artificial Sequence: Synthetic peptide
NTLGQIVKK

SEQ ID NO: 4476 - protein, 10 aa, Artificial Sequence
  Description of Artificial Sequence: Synthetic peptide
GSNFTSTTVK

SEQ ID NO: 4477 - protein, 11 aa, Artificial Sequence
  Description of Artificial Sequence: Synthetic peptide
SIWDNNKDSTK

SEQ ID NO: 4478 - protein, 11 aa, Artificial Sequence
  Description of Artificial Sequence: Synthetic peptide
KALTEVVPLTK

SEQ ID NO: 4479 - protein, 9 aa, Artificial Sequence
  Description of Artificial Sequence: Synthetic peptide
SLTDTTNQK

SEQ ID NO: 4480 - protein, 9 aa, Artificial Sequence
  Description of Artificial Sequence: Synthetic peptide
ITTDISNKK

SEQ ID NO: 4481 - protein, 9 aa, Artificial Sequence
  Description of Artificial Sequence: Synthetic peptide
IIATDIQTK

SEQ ID NO: 4482 - protein, 11 aa, Artificial Sequence
  Description of Artificial Sequence: Synthetic peptide
KIKPPLPSVTK

SEQ ID NO: 4483 - protein, 10 aa, Artificial Sequence
  Description of Artificial Sequence: Synthetic peptide
ATESIVIWGK

SEQ ID NO: 4484 - protein, 9 aa, Artificial Sequence
  Description of Artificial Sequence: Synthetic peptide
GNNKTIIFK

SEQ ID NO: 4485 - protein, 11 aa, Artificial Sequence
  Description of Artificial Sequence: Synthetic peptide
QSQGVVESINK

SEQ ID NO: 4486 - protein, 11 aa, Artificial Sequence
  Description of Artificial Sequence: Synthetic peptide
VTNSATIMMQR

SEQ ID NO: 4487 - protein, 9 aa, Artificial Sequence
  Description of Artificial Sequence: Synthetic peptide
KQLTEAVQK

SEQ ID NO: 4488 - protein, 11 aa, Artificial Sequence
  Description of Artificial Sequence: Synthetic peptide
ATDIQTKELQK

SEQ ID NO: 4489 - protein, 10 aa, Artificial Sequence
  Description of Artificial Sequence: Synthetic peptide
SILDIKQGPK

SEQ ID NO: 4490 - protein, 10 aa, Artificial Sequence
  Description of Artificial Sequence: Synthetic peptide
ITMGPGKVYY

SEQ ID NO: 4491 - protein, 9 aa, Artificial Sequence
  Description of Artificial Sequence: Synthetic peptide
NSGAIMMQK

SEQ ID NO: 4492 - protein, 10 aa, Artificial Sequence
  Description of Artificial Sequence: Synthetic peptide
VVESMNKELK

SEQ ID NO: 4493 - protein, 9 aa, Artificial Sequence
  Description of Artificial Sequence: Synthetic peptide
KLVSTGIRK

SEQ ID NO: 4494 - protein, 11 aa, Artificial Sequence
  Description of Artificial Sequence: Synthetic peptide
VTNSATIMMQK

SEQ ID NO: 4495 - protein, 11 aa, Artificial Sequence
  Description of Artificial Sequence: Synthetic peptide
VTNSGAIMMQK

SEQ ID NO: 4496 - protein, 9 aa, Artificial Sequence
  Description of Artificial Sequence: Synthetic peptide
NTLGQIVKK

SEQ ID NO: 4497 - protein, 9 aa, Artificial Sequence
  Description of Artificial Sequence: Synthetic peptide
QIYPGIKVK

SEQ ID NO: 4498 - protein, 9 aa, Artificial Sequence
  Description of Artificial Sequence: Synthetic peptide
SVITQACPK

SEQ ID NO: 4499 - protein, 9 aa, Artificial Sequence
  Description of Artificial Sequence: Synthetic peptide
QIIEQLIQK

SEQ ID NO: 4500 - protein, 10 aa, Artificial Sequence
  Description of Artificial Sequence: Synthetic peptide
TVQPIVLPEK

SEQ ID NO: 4501 - protein, 11 aa, Artificial Sequence
  Description of Artificial Sequence: Synthetic peptide
TVNDIQKLVGK

SEQ ID NO: 4502 - protein, 9 aa, Artificial Sequence
  Description of Artificial Sequence: Synthetic peptide
ALAALITPK

SEQ ID NO: 4503 - protein, 9 aa, Artificial Sequence
  Description of Artificial Sequence: Synthetic peptide
APAGFAILK

SEQ ID NO: 4504 - protein, 9 aa, Artificial Sequence
  Description of Artificial Sequence: Synthetic peptide
AVDLSHFLK

SEQ ID NO: 4505 - protein, 9 aa, Artificial Sequence
  Description of Artificial Sequence: Synthetic peptide
ITTDISNKK

SEQ ID NO: 4506 - protein, 10 aa, Artificial Sequence
  Description of Artificial Sequence: Synthetic peptide
GSNFTSTTVK

SEQ ID NO: 4507 - protein, 9 aa, Artificial Sequence
  Description of Artificial Sequence: Synthetic peptide
ALAVLITPK

SEQ ID NO: 4508 - protein, 9 aa, Artificial Sequence
  Description of Artificial Sequence: Synthetic peptide
NSATIMMQK

SEQ ID NO: 4509 - protein, 10 aa, Artificial Sequence
  Description of Artificial Sequence: Synthetic peptide
AAVDLSHFLK

SEQ ID NO: 4510 - protein, 9 aa, Artificial Sequence
  Description of Artificial Sequence: Synthetic peptide
NSGAIMMQK

SEQ ID NO: 4511 - protein, 9 aa, Artificial Sequence
  Description of Artificial Sequence: Synthetic peptide
SVNFTDNAK

SEQ ID NO: 4512 - protein, 11 aa, Artificial Sequence
  Description of Artificial Sequence: Synthetic peptide
VTNSATIMMQR

SEQ ID NO: 4513 - protein, 9 aa, Artificial Sequence
  Description of Artificial Sequence: Synthetic peptide
QTHQVSLSK

SEQ ID NO: 4514 - protein, 11 aa, Artificial Sequence
  Description of Artificial Sequence: Synthetic peptide
ATDIQTKELQK

SEQ ID NO: 4515 - protein, 10 aa, Artificial Sequence
  Description of Artificial Sequence: Synthetic peptide
ITMGPGKVYY

SEQ ID NO: 4516 - protein, 9 aa, Artificial Sequence
  Description of Artificial Sequence: Synthetic peptide
AIFQSSMTK

SEQ ID NO: 4517 - protein, 9 aa, Artificial Sequence
  Description of Artificial Sequence: Synthetic peptide
SVIGWPTVR

SEQ ID NO: 4518 - protein, 10 aa, Artificial Sequence
  Description of Artificial Sequence: Synthetic peptide
GSNFTSSAVK

SEQ ID NO: 4519 - protein, 10 aa, Artificial Sequence
  Description of Artificial Sequence: Synthetic peptide
ATESIVIWGK

SEQ ID NO: 4520 - protein, 11 aa, Artificial Sequence
  Description of Artificial Sequence: Synthetic peptide
VVSLTDTTNQK

SEQ ID NO: 4521 - protein, 10 aa, Artificial Sequence
  Description of Artificial Sequence: Synthetic peptide
ASMTLTVQAR

SEQ ID NO: 4522 - protein, 10 aa, Artificial Sequence
  Description of Artificial Sequence: Synthetic peptide
CTPAGFAILK

SEQ ID NO: 4523 - protein, 9 aa, Artificial Sequence
  Description of Artificial Sequence: Synthetic peptide
SNFTSTTVK

SEQ ID NO: 4524 - protein, 10 aa, Artificial Sequence
  Description of Artificial Sequence: Synthetic peptide
VTLTDTTNQK

SEQ ID NO: 4525 - protein, 11 aa, Artificial Sequence
  Description of Artificial Sequence: Synthetic peptide
VTSAPAIMMQR

SEQ ID NO: 4526 - protein, 9 aa, Artificial Sequence
  Description of Artificial Sequence: Synthetic peptide
QIIEQLIKK

SEQ ID NO: 4527 - protein, 8 aa, Artificial Sequence
  Description of Artificial Sequence: Synthetic peptide
SATIMMQK

SEQ ID NO: 4528 - protein, 10 aa, Artificial Sequence
  Description of Artificial Sequence: Synthetic peptide
GALDLSHFLK

SEQ ID NO: 4529 - protein, 10 aa, Artificial Sequence
  Description of Artificial Sequence: Synthetic peptide
SQIYPGIKVK

SEQ ID NO: 4530 - protein, 11 aa, Artificial Sequence
  Description of Artificial Sequence: Synthetic peptide
RVIEVVQGACR

SEQ ID NO: 4531 - protein, 10 aa, Artificial Sequence
  Description of Artificial Sequence: Synthetic peptide
ITMGPGRVYY

SEQ ID NO: 4532 - protein, 9 aa, Artificial Sequence
  Description of Artificial Sequence: Synthetic peptide
GTNETEIFR

SEQ ID NO: 4533 - protein, 10 aa, Artificial Sequence
  Description of Artificial Sequence: Synthetic peptide
SQIDQASLPK

SEQ ID NO: 4534 - protein, 11 aa, Artificial Sequence
  Description of Artificial Sequence: Synthetic peptide
GVVESMNKELK

SEQ ID NO: 4535 - protein, 9 aa, Artificial Sequence
  Description of Artificial Sequence: Synthetic peptide
DTLNQIVGK

SEQ ID NO: 4536 - protein, 9 aa, Artificial Sequence
  Description of Artificial Sequence: Synthetic peptide
GNNKTIIFK

SEQ ID NO: 4537 - protein, 9 aa, Artificial Sequence
  Description of Artificial Sequence: Synthetic peptide
GTEGLTMDK

SEQ ID NO: 4538 - protein, 9 aa, Artificial Sequence
  Description of Artificial Sequence: Synthetic peptide
GVAPTTAKR

SEQ ID NO: 4539 - protein, 9 aa, Artificial Sequence
  Description of Artificial Sequence: Synthetic peptide
QIYPGIKVR

SEQ ID NO: 4540 - protein, 10 aa, Artificial Sequence
  Description of Artificial Sequence: Synthetic peptide
ASMALTVQAR

SEQ ID NO: 4541 - protein, 9 aa, Artificial Sequence
  Description of Artificial Sequence: Synthetic peptide
SVTLTVQAR

SEQ ID NO: 4542 - protein, 10 aa, Artificial Sequence
  Description of Artificial Sequence: Synthetic peptide
GVETTTPPQK

SEQ ID NO: 4543 - protein, 10 aa, Artificial Sequence
  Description of Artificial Sequence: Synthetic peptide
SILDIKQGPK

SEQ ID NO: 4544 - protein, 10 aa, Artificial Sequence
  Description of Artificial Sequence: Synthetic peptide
TSAPAIMMQR

SEQ ID NO: 4545 - protein, 9 aa, Artificial Sequence
  Description of Artificial Sequence: Synthetic peptide
NYTNLIYTL

SEQ ID NO: 4546 - protein, 9 aa, Artificial Sequence
  Description of Artificial Sequence: Synthetic peptide
NYTSLIYTL

SEQ ID NO: 4547 - protein, 9 aa, Artificial Sequence
  Description of Artificial Sequence: Synthetic peptide
NYTGLIYTL

SEQ ID NO: 4548 - protein, 9 aa, Artificial Sequence
  Description of Artificial Sequence: Synthetic peptide
NYTSLIHSL

SEQ ID NO: 4549 - protein, 9 aa, Artificial Sequence
  Description of Artificial Sequence: Synthetic peptide
RYLEDQQLL

SEQ ID NO: 4550 - protein, 9 aa, Artificial Sequence
  Description of Artificial Sequence: Synthetic peptide
VLVNVTENF

SEQ ID NO: 4551 - protein, 9 aa, Artificial Sequence
  Description of Artificial Sequence: Synthetic peptide
RYLQDQQLL

SEQ ID NO: 4552 - protein, 9 aa, Artificial Sequence
  Description of Artificial Sequence: Synthetic peptide
IYQEPFKNL

SEQ ID NO: 4553 - protein, 9 aa, Artificial Sequence
  Description of Artificial Sequence: Synthetic peptide
YETEVHNVW

SEQ ID NO: 4554 - protein, 9 aa, Artificial Sequence
  Description of Artificial Sequence: Synthetic peptide
TENLWVTVY

SEQ ID NO: 4555 - protein, 9 aa, Artificial Sequence
  Description of Artificial Sequence: Synthetic peptide
VLENVTENF

SEQ ID NO: 4556 - protein, 9 aa, Artificial Sequence
  Description of Artificial Sequence: Synthetic peptide
RYLKDQQLL

SEQ ID NO: 4557 - protein, 10 aa, Artificial Sequence
  Description of Artificial Sequence: Synthetic peptide
AFLQGKAREF

SEQ ID NO: 4558 - protein, 9 aa, Artificial Sequence
  Description of Artificial Sequence: Synthetic peptide
HYQSIHPRI

SEQ ID NO: 4559 - protein, 9 aa, Artificial Sequence
  Description of Artificial Sequence: Synthetic peptide
AENLWVTVY

SEQ ID NO: 4560 - protein, 9 aa, Artificial Sequence
  Description of Artificial Sequence: Synthetic peptide
NYTNLIYTL

SEQ ID NO: 4561 - protein, 9 aa, Artificial Sequence
  Description of Artificial Sequence: Synthetic peptide
NYTSLIYTL

SEQ ID NO: 4562 - protein, 9 aa, Artificial Sequence
  Description of Artificial Sequence: Synthetic peptide
NYTSLIHSL

SEQ ID NO: 4563 - protein, 9 aa, Artificial Sequence
  Description of Artificial Sequence: Synthetic peptide
RYLEDQQLL

SEQ ID NO: 4564 - protein, 9 aa, Artificial Sequence
  Description of Artificial Sequence: Synthetic peptide
NYTGLIYTL

SEQ ID NO: 4565 - protein, 9 aa, Artificial Sequence
  Description of Artificial Sequence: Synthetic peptide
RYLQDQQLL

SEQ ID NO: 4566 - protein, 9 aa, Artificial Sequence
  Description of Artificial Sequence: Synthetic peptide
IYQEPFKNL

SEQ ID NO: 4567 - protein, 9 aa, Artificial Sequence
  Description of Artificial Sequence: Synthetic peptide
RYLKDQQLL

SEQ ID NO: 4568 - protein, 9 aa, Artificial Sequence
  Description of Artificial Sequence: Synthetic peptide
YYDPTKDLI

SEQ ID NO: 4569 - protein, 9 aa, Artificial Sequence
  Description of Artificial Sequence: Synthetic peptide
YYDPSKDLI

SEQ ID NO: 4570 - protein, 10 aa, Artificial Sequence
  Description of Artificial Sequence: Synthetic peptide
ETINEEAAEW

SEQ ID NO: 4571 - protein, 9 aa, Artificial Sequence
  Description of Artificial Sequence: Synthetic peptide
EVIPMFSAL

SEQ ID NO: 4572 - protein, 9 aa, Artificial Sequence
  Description of Artificial Sequence: Synthetic peptide
NVTENFNAW

SEQ ID NO: 4573 - protein, 9 aa, Artificial Sequence
  Description of Artificial Sequence: Synthetic peptide
EVIPMFAAL

SEQ ID NO: 4574 - protein, 10 aa, Artificial Sequence
  Description of Artificial Sequence: Synthetic peptide
EIQKQGQGQW

SEQ ID NO: 4575 - protein, 9 aa, Artificial Sequence
  Description of Artificial Sequence: Synthetic peptide
EVVIRSENF

SEQ ID NO: 4576 - protein, 9 aa, Artificial Sequence
  Description of Artificial Sequence: Synthetic peptide
EVVIRSVNF

SEQ ID NO: 4577 - protein, 9 aa, Artificial Sequence
  Description of Artificial Sequence: Synthetic peptide
DVIIRSDNF

SEQ ID NO: 4578 - protein, 9 aa, Artificial Sequence
  Description of Artificial Sequence: Synthetic peptide
EAGATRISF

SEQ ID NO: 4579 - protein, 9 aa, Artificial Sequence
  Description of Artificial Sequence: Synthetic peptide
DIAGTTSTL

SEQ ID NO: 4580 - protein, 9 aa, Artificial Sequence
  Description of Artificial Sequence: Synthetic peptide
NVTENFNMW

SEQ ID NO: 4581 - protein, 10 aa, Artificial Sequence
  Description of Artificial Sequence: Synthetic peptide
DIVPIDNDSY

SEQ ID NO: 4582 - protein, 10 aa, Artificial Sequence
  Description of Artificial Sequence: Synthetic peptide
DLADQLIHVY

SEQ ID NO: 4583 - protein, 9 aa, Artificial Sequence
  Description of Artificial Sequence: Synthetic peptide
EAKLVITTY

SEQ ID NO: 4584 - protein, 9 aa, Artificial Sequence
  Description of Artificial Sequence: Synthetic peptide
EIIGDIRQA

SEQ ID NO: 4585 - protein, 9 aa, Artificial Sequence
  Description of Artificial Sequence: Synthetic peptide
EQIWNHTTW

SEQ ID NO: 4586 - protein, 10 aa, Artificial Sequence
  Description of Artificial Sequence: Synthetic peptide
EVNIVTDSQY

SEQ ID NO: 4587 - protein, 10 aa, Artificial Sequence
  Description of Artificial Sequence: Synthetic peptide
EVNIVTDSQY

SEQ ID NO: 4588 - protein, 9 aa, Artificial Sequence
  Description of Artificial Sequence: Synthetic peptide
EVIPMFSAL

SEQ ID NO: 4589 - protein, 9 aa, Artificial Sequence
  Description of Artificial Sequence: Synthetic peptide
EIIGDIRQA

SEQ ID NO: 4590 - protein, 10 aa, Artificial Sequence
  Description of Artificial Sequence: Synthetic peptide
EVFRPGGGNM

SEQ ID NO: 4591 - protein, 9 aa, Artificial Sequence
  Description of Artificial Sequence: Synthetic peptide
ETKLGKAGY

SEQ ID NO: 4592 - protein, 9 aa, Artificial Sequence
  Description of Artificial Sequence: Synthetic peptide
EVVIRSVNF

SEQ ID NO: 4593 - protein, 9 aa, Artificial Sequence
  Description of Artificial Sequence: Synthetic peptide
ETPGIRYQY

SEQ ID NO: 4594 - protein, 10 aa, Artificial Sequence
  Description of Artificial Sequence: Synthetic peptide
DIVPIDNDSY

SEQ ID NO: 4595 - protein, 9 aa, Artificial Sequence
  Description of Artificial Sequence: Synthetic peptide
EVIPMFAAL

SEQ ID NO: 4596 - protein, 9 aa, Artificial Sequence
  Description of Artificial Sequence: Synthetic peptide
DVIIRSDNF

SEQ ID NO: 4597 - protein, 10 aa, Artificial Sequence
  Description of Artificial Sequence: Synthetic peptide
EVIPAETGQE

SEQ ID NO: 4598 - protein, 9 aa, Artificial Sequence
  Description of Artificial Sequence: Synthetic peptide
EAKLVITTY

SEQ ID NO: 4599 - protein, 9 aa, Artificial Sequence
  Description of Artificial Sequence: Synthetic peptide
VTIGKIGNM

SEQ ID NO: 4600 - protein, 10 aa, Artificial Sequence
  Description of Artificial Sequence: Synthetic peptide
EIFRPGGGNM

SEQ ID NO: 4601 - protein, 9 aa, Artificial Sequence
  Description of Artificial Sequence: Synthetic peptide
YTPGPGTRY

SEQ ID NO: 4602 - protein, 9 aa, Artificial Sequence
  Description of Artificial Sequence: Synthetic peptide
EVVIRSENF

SEQ ID NO: 4603 - protein, 10 aa, Artificial Sequence
  Description of Artificial Sequence: Synthetic peptide
EIFRPGGGDM

SEQ ID NO: 4604 - protein, 9 aa, Artificial Sequence
  Description of Artificial Sequence: Synthetic peptide
EVIPAETGQ

SEQ ID NO: 4605 - protein, 11 aa, Artificial Sequence
  Description of Artificial Sequence: Synthetic peptide
QTGSEELRSLY

SEQ ID NO: 4606 - protein, 10 aa, Artificial Sequence
  Description of Artificial Sequence: Synthetic peptide
ELADQLIHLY

SEQ ID NO: 4607 - protein, 9 aa, Artificial Sequence
  Description of Artificial Sequence: Synthetic peptide
EAGATRISF

SEQ ID NO: 4608 - protein, 10 aa, Artificial Sequence
  Description of Artificial Sequence: Synthetic peptide
EVFRPGGGNM

SEQ ID NO: 4609 - protein, 9 aa, Artificial Sequence
  Description of Artificial Sequence: Synthetic peptide
EVIPMFSAL

SEQ ID NO: 4610 - protein, 9 aa, Artificial Sequence
  Description of Artificial Sequence: Synthetic peptide
EVVIRSVNF

SEQ ID NO: 4611 - protein, 9 aa, Artificial Sequence
  Description of Artificial Sequence: Synthetic peptide
EVVIRSENF

SEQ ID NO: 4612 - protein, 9 aa, Artificial Sequence
  Description of Artificial Sequence: Synthetic peptide
DVIIRSDNF

SEQ ID NO: 4613 - protein, 9 aa, Artificial Sequence
  Description of Artificial Sequence: Synthetic peptide
EVIPMFAAL

SEQ ID NO: 4614 - protein, 10 aa, Artificial Sequence
  Description of Artificial Sequence: Synthetic peptide
EVNIVTDSQY

SEQ ID NO: 4615 - protein, 10 aa, Artificial Sequence
  Description of Artificial Sequence: Synthetic peptide
EIFRPGGGNM

SEQ ID NO: 4616 - protein, 9 aa, Artificial Sequence
  Description of Artificial Sequence: Synthetic peptide
VTIGKIGNM

SEQ ID NO: 4617 - protein, 9 aa, Artificial Sequence
  Description of Artificial Sequence: Synthetic peptide
DIAGTTSTL

SEQ ID NO: 4618 - protein, 10 aa, Artificial Sequence
  Description of Artificial Sequence: Synthetic peptide
EIFRPGGGDM

SEQ ID NO: 4619 - protein, 9 aa, Artificial Sequence
  Description of Artificial Sequence: Synthetic peptide
EAKLVITTY

SEQ ID NO: 4620 - protein, 9 aa, Artificial Sequence
  Description of Artificial Sequence: Synthetic peptide
EIIGDIRQA

SEQ ID NO: 4621 - protein, 9 aa, Artificial Sequence
  Description of Artificial Sequence: Synthetic peptide
EAGATRISF

SEQ ID NO: 4622 - protein, 10 aa, Artificial Sequence
  Description of Artificial Sequence: Synthetic peptide
DIVPIDNDSY

SEQ ID NO: 4623 - protein, 10 aa, Artificial Sequence
  Description of Artificial Sequence: Synthetic peptide
DTSGRLVDGF

SEQ ID NO: 4624 - protein, 9 aa, Artificial Sequence
  Description of Artificial Sequence: Synthetic peptide
EVIPMFSAL

SEQ ID NO: 4625 - protein, 9 aa, Artificial Sequence
  Description of Artificial Sequence: Synthetic peptide
EIIGDIRQA

SEQ ID NO: 4626 - protein, 9 aa, Artificial Sequence
  Description of Artificial Sequence: Synthetic peptide
EVIPMFAAL

SEQ ID NO: 4627 - protein, 9 aa, Artificial Sequence
  Description of Artificial Sequence: Synthetic peptide
VTIGKIGNM

SEQ ID NO: 4628 - protein, 10 aa, Artificial Sequence
  Description of Artificial Sequence: Synthetic peptide
EVFRPGGGNM

SEQ ID NO: 4629 - protein, 9 aa, Artificial Sequence
  Description of Artificial Sequence: Synthetic peptide
EIIGDIRRA

SEQ ID NO: 4630 - protein, 9 aa, Artificial Sequence
  Description of Artificial Sequence: Synthetic peptide
GVAPTTAKR

SEQ ID NO: 4631 - protein, 10 aa, Artificial Sequence
  Description of Artificial Sequence: Synthetic peptide
EIFRPGGGNM

SEQ ID NO: 4632 - protein, 9 aa, Artificial Sequence
  Description of Artificial Sequence: Synthetic peptide
MVHQAISPR

SEQ ID NO: 4633 - protein, 9 aa, Artificial Sequence
  Description of Artificial Sequence: Synthetic peptide
ELYPLTSLR

SEQ ID NO: 4634 - protein, 10 aa, Artificial Sequence
  Description of Artificial Sequence: Synthetic peptide
TSAPAIMMQR

SEQ ID NO: 4635 - protein, 9 aa, Artificial Sequence
  Description of Artificial Sequence: Synthetic peptide
ETVDIHCIR

SEQ ID NO: 4636 - protein, 9 aa, Artificial Sequence
  Description of Artificial Sequence: Synthetic peptide
DIAGTTSTL

SEQ ID NO: 4637 - protein, 9 aa, Artificial Sequence
  Description of Artificial Sequence: Synthetic peptide
ESVEINCTR

SEQ ID NO: 4638 - protein, 10 aa, Artificial Sequence
  Description of Artificial Sequence: Synthetic peptide
DTNTNSSSGR

SEQ ID NO: 4639 - protein, 10 aa, Artificial Sequence
  Description of Artificial Sequence: Synthetic peptide
DNSDIKVVPR

SEQ ID NO: 4640 - protein, 9 aa, Artificial Sequence
  Description of Artificial Sequence: Synthetic peptide
SVIGWPTVR

SEQ ID NO: 4641 - protein, 9 aa, Artificial Sequence
  Description of Artificial Sequence: Synthetic peptide
SVTLTVQAR

SEQ ID NO: 4642 - protein, 9 aa, Artificial Sequence
  Description of Artificial Sequence: Synthetic peptide
LFNTVATLY

SEQ ID NO: 4643 - protein, 9 aa, Artificial Sequence
  Description of Artificial Sequence: Synthetic peptide
TVLDVGDAY

SEQ ID NO: 4644 - protein, 9 aa, Artificial Sequence
  Description of Artificial Sequence: Synthetic peptide
LYNTVATLY

SEQ ID NO: 4645 - protein, 9 aa, Artificial Sequence
  Description of Artificial Sequence: Synthetic peptide
LFNTIATLY

SEQ ID NO: 4646 - protein, 10 aa, Artificial Sequence
  Description of Artificial Sequence: Synthetic peptide
GNSSQVSQNY

SEQ ID NO: 4647 - protein, 9 aa, Artificial Sequence
  Description of Artificial Sequence: Synthetic peptide
ITKGLGISY

SEQ ID NO: 4648 - protein, 9 aa, Artificial Sequence
  Description of Artificial Sequence: Synthetic peptide
NSSQVSQNY

SEQ ID NO: 4649 - protein, 9 aa, Artificial Sequence
  Description of Artificial Sequence: Synthetic peptide
LYNTIAVLY

SEQ ID NO: 4650 - protein, 9 aa, Artificial Sequence
  Description of Artificial Sequence: Synthetic peptide
SFEPIPIHY

SEQ ID NO: 4651 - protein, 9 aa, Artificial Sequence
  Description of Artificial Sequence: Synthetic peptide
VWSIVIIEY

SEQ ID NO: 4652 - protein, 10 aa, Artificial Sequence
  Description of Artificial Sequence: Synthetic peptide
ITMGPGKVYY

SEQ ID NO: 4653 - protein, 9 aa, Artificial Sequence
  Description of Artificial Sequence: Synthetic peptide
SFQPIPIHY

SEQ ID NO: 4654 - protein, 9 aa, Artificial Sequence
  Description of Artificial Sequence: Synthetic peptide
SFEPIPIYY

SEQ ID NO: 4655 - protein, 9 aa, Artificial Sequence
  Description of Artificial Sequence: Synthetic peptide
ITKALGISY

SEQ ID NO: 4656 - protein, 9 aa, Artificial Sequence
  Description of Artificial Sequence: Synthetic peptide
KNNPVSQNY

SEQ ID NO: 4657 - protein, 10 aa, Artificial Sequence
  Description of Artificial Sequence: Synthetic peptide
SLYNTVATLY

SEQ ID NO: 4658 - protein, 9 aa, Artificial Sequence
  Description of Artificial Sequence: Synthetic peptide
LFNTVATLY

SEQ ID NO: 4659 - protein, 9 aa, Artificial Sequence
  Description of Artificial Sequence: Synthetic peptide
LFNTIATLY

SEQ ID NO: 4660 - protein, 9 aa, Artificial Sequence
  Description of Artificial Sequence: Synthetic peptide
LYNTVATLY

SEQ ID NO: 4661 - protein, 10 aa, Artificial Sequence
  Description of Artificial Sequence: Synthetic peptide
GNSSQVSQNY

SEQ ID NO: 4662 - protein, 9 aa, Artificial Sequence
  Description of Artificial Sequence: Synthetic peptide
GYFPDWQNY

SEQ ID NO: 4663 - protein, 9 aa, Artificial Sequence
  Description of Artificial Sequence: Synthetic peptide
SFEPIPIHY

SEQ ID NO: 4664 - protein, 9 aa, Artificial Sequence
  Description of Artificial Sequence: Synthetic peptide
SFQPIPIHY

SEQ ID NO: 4665 - protein, 9 aa, Artificial Sequence
  Description of Artificial Sequence: Synthetic peptide
SFEPIPIYY

SEQ ID NO: 4666 - protein, 9 aa, Artificial Sequence
  Description of Artificial Sequence: Synthetic peptide
LYNTIAVLY

SEQ ID NO: 4667 - protein, 10 aa, Artificial Sequence
  Description of Artificial Sequence: Synthetic peptide
ITMGPGRVYY

SEQ ID NO: 4668 - protein, 9 aa, Artificial Sequence
  Description of Artificial Sequence: Synthetic peptide
VWTIVFIEY

SEQ ID NO: 4669 - protein, 9 aa, Artificial Sequence
  Description of Artificial Sequence: Synthetic peptide
ITKGLGISY

SEQ ID NO: 4670 - protein, 10 aa, Artificial Sequence
  Description of Artificial Sequence: Synthetic peptide
ITMGPGKVYY

SEQ ID NO: 4671 - protein, 9 aa, Artificial Sequence
  Description of Artificial Sequence: Synthetic peptide
NSSQVSQNY

SEQ ID NO: 4672 - protein, 10 aa, Artificial Sequence
  Description of Artificial Sequence: Synthetic peptide
VSFEPIPIYY

SEQ ID NO: 4673 - protein, 9 aa, Artificial Sequence
  Description of Artificial Sequence: Synthetic peptide
TMGPGRVYY

SEQ ID NO: 4674 - protein, 9 aa, Artificial Sequence
  Description of Artificial Sequence: Synthetic peptide
GYFPDWDNY

SEQ ID NO: 4675 - protein, 9 aa, Artificial Sequence
  Description of Artificial Sequence: Synthetic peptide
ITKALGISY

SEQ ID NO: 4676 - protein, 9 aa, Artificial Sequence
  Description of Artificial Sequence: Synthetic peptide
TVLDVGDAY

SEQ ID NO: 4677 - protein, 9 aa, Artificial Sequence
  Description of Artificial Sequence: Synthetic peptide
TMGPGKVYY

SEQ ID NO: 4678 - protein, 10 aa, Artificial Sequence
  Description of Artificial Sequence: Synthetic peptide
SEAGATRISF

SEQ ID NO: 4679 - protein, 9 aa, Artificial Sequence
  Description of Artificial Sequence: Synthetic peptide
KIKPPLPSV

SEQ ID NO: 4680 - protein, 9 aa, Artificial Sequence
  Description of Artificial Sequence: Synthetic peptide
SESAIRNAI

SEQ ID NO: 4681 - protein, 9 aa, Artificial Sequence
  Description of Artificial Sequence: Synthetic peptide
YETEVHNVW

SEQ ID NO: 4682 - protein, 9 aa, Artificial Sequence
  Description of Artificial Sequence: Synthetic peptide
KELYPLTSL

SEQ ID NO: 4683 - protein, 9 aa, Artificial Sequence
  Description of Artificial Sequence: Synthetic peptide
SEAKWNNTL

SEQ ID NO: 4684 - protein, 9 aa, Artificial Sequence
  Description of Artificial Sequence: Synthetic peptide
ITKGLGISY

SEQ ID NO: 4685 - protein, 9 aa, Artificial Sequence
  Description of Artificial Sequence: Synthetic peptide
KNNPVSQNY

SEQ ID NO: 4686 - protein, 11 aa, Artificial Sequence
  Description of Artificial Sequence: Synthetic peptide
KQNPDIVIYQY

SEQ ID NO: 4687 - protein, 9 aa, Artificial Sequence
  Description of Artificial Sequence: Synthetic peptide
ITKALGISY

SEQ ID NO: 4688 - protein, 11 aa, Artificial Sequence
  Description of Artificial Sequence: Synthetic peptide
KQNPEIVIYQY

SEQ ID NO: 4689 - protein, 9 aa, Artificial Sequence
  Description of Artificial Sequence: Synthetic peptide
HSNQVSQNY

SEQ ID NO: 4690 - protein, 10 aa, Artificial Sequence
  Description of Artificial Sequence: Synthetic peptide
ITMGPGKVYY

SEQ ID NO: 4691 - protein, 10 aa, Artificial Sequence
  Description of Artificial Sequence: Synthetic peptide
VQMNNNNNSY

SEQ ID NO: 4692 - protein, 9 aa, Artificial Sequence
  Description of Artificial Sequence: Synthetic peptide
NSSQVSQNY

SEQ ID NO: 4693 - protein, 10 aa, Artificial Sequence
  Description of Artificial Sequence: Synthetic peptide
SISERILGTY

SEQ ID NO: 4694 - protein, 11 aa, Artificial Sequence
  Description of Artificial Sequence: Synthetic peptide
QTGSEELRSLY

SEQ ID NO: 4695 - protein, 9 aa, Artificial Sequence
  Description of Artificial Sequence: Synthetic peptide
KQNPEIVIY

SEQ ID NO: 4696 - protein, 11 aa, Artificial Sequence
  Description of Artificial Sequence: Synthetic peptide
SVNNETPGIRY

SEQ ID NO: 4697 - protein, 9 aa, Artificial Sequence
  Description of Artificial Sequence: Synthetic peptide
TVLDVGDAY

SEQ ID NO: 4698 - protein, 11 aa, Artificial Sequence
  Description of Artificial Sequence: Synthetic peptide
TGNSSQVSQNY

SEQ ID NO: 4699 - protein, 9 aa, Artificial Sequence
  Description of Artificial Sequence: Synthetic peptide
LGQHIYETY

SEQ ID NO: 4700 - protein, 9 aa, Artificial Sequence
  Description of Artificial Sequence: Synthetic peptide
ITMGPGKVY

SEQ ID NO: 4701 - protein, 9 aa, Artificial Sequence
  Description of Artificial Sequence: Synthetic peptide
KQNPDIVIY

SEQ ID NO: 4702 - protein, 10 aa, Artificial Sequence
  Description of Artificial Sequence: Synthetic peptide
ILKEPVHGVY

SEQ ID NO: 4703 - protein, 9 aa, Artificial Sequence
  Description of Artificial Sequence: Synthetic peptide
ITMGPGRVY

SEQ ID NO: 4704 - protein, 10 aa, Artificial Sequence
  Description of Artificial Sequence: Synthetic peptide
ITMGPGRVYY

SEQ ID NO: 4705 - protein, 9 aa, Artificial Sequence
  Description of Artificial Sequence: Synthetic peptide
ISERILGTY

SEQ ID NO: 4706 - protein, 9 aa, Artificial Sequence
  Description of Artificial Sequence: Synthetic peptide
KAQEEHEKY

SEQ ID NO: 4707 - protein, 9 aa, Artificial Sequence
  Description of Artificial Sequence: Synthetic peptide
KAQDEHEKY

SEQ ID NO: 4708 - protein, 9 aa, Artificial Sequence
  Description of Artificial Sequence: Synthetic peptide
ITKGLGISY

SEQ ID NO: 4709 - protein, 11 aa, Artificial Sequence
  Description of Artificial Sequence: Synthetic peptide
KQNPDIVIYQY

SEQ ID NO: 4710 - protein, 11 aa, Artificial Sequence
  Description of Artificial Sequence: Synthetic peptide
KQNPEIVIYQY

SEQ ID NO: 4711 - protein, 10 aa, Artificial Sequence
  Description of Artificial Sequence: Synthetic peptide
ITMGPGKVYY

SEQ ID NO: 4712 - protein, 9 aa, Artificial Sequence
  Description of Artificial Sequence: Synthetic peptide
KNNPVSQNY

SEQ ID NO: 4713 - protein, 9 aa, Artificial Sequence
  Description of Artificial Sequence: Synthetic peptide
ITKALGISY

SEQ ID NO: 4714 - protein, 10 aa, Artificial Sequence
  Description of Artificial Sequence: Synthetic peptide
RVIEVLQRVY

SEQ ID NO: 4715 - protein, 9 aa, Artificial Sequence
  Description of Artificial Sequence: Synthetic peptide
KQNPEIVIY

SEQ ID NO: 4716 - protein, 9 aa, Artificial Sequence
  Description of Artificial Sequence: Synthetic peptide
KQNPDIVIY

SEQ ID NO: 4717 - protein, 10 aa, Artificial Sequence
  Description of Artificial Sequence: Synthetic peptide
ITMGPGRVYY

SEQ ID NO: 4718 - protein, 9 aa, Artificial Sequence
  Description of Artificial Sequence: Synthetic peptide
KQGQGQWTY

SEQ ID NO: 4719 - protein, 9 aa, Artificial Sequence
  Description of Artificial Sequence: Synthetic peptide
ITMGPGKVY

SEQ ID NO: 4720 - protein, 9 aa, Artificial Sequence
  Description of Artificial Sequence: Synthetic peptide
ITMGPGRVY

SEQ ID NO: 4721 - protein, 10 aa, Artificial Sequence
  Description of Artificial Sequence: Synthetic peptide
SISERILGTY

SEQ ID NO: 4722 - protein, 9 aa, Artificial Sequence
  Description of Artificial Sequence: Synthetic peptide
HSNQVSQNY

SEQ ID NO: 4723 - protein, 11 aa, Artificial Sequence
  Description of Artificial Sequence: Synthetic peptide
VTNSATIMMQR

SEQ ID NO: 4724 - protein, 9 aa, Artificial Sequence
  Description of Artificial Sequence: Synthetic peptide
SVIGWPTVR

SEQ ID NO: 4725 - protein, 9 aa, Artificial Sequence
  Description of Artificial Sequence: Synthetic peptide
CTRPNNYTR

SEQ ID NO: 4726 - protein, 9 aa, Artificial Sequence
  Description of Artificial Sequence: Synthetic peptide
RLIDRIIER

SEQ ID NO: 4727 - protein, 11 aa, Artificial Sequence
  Description of Artificial Sequence: Synthetic peptide
RVIEVLQRVYR

SEQ ID NO: 4728 - protein, 11 aa, Artificial Sequence
  Description of Artificial Sequence: Synthetic peptide
RVIEVVQGACR

SEQ ID NO: 4729 - protein, 9 aa, Artificial Sequence
  Description of Artificial Sequence: Synthetic peptide
RLIDRLIER

SEQ ID NO: 4730 - protein, 9 aa, Artificial Sequence
  Description of Artificial Sequence: Synthetic peptide
KALGISYGR

SEQ ID NO: 4731 - protein, 9 aa, Artificial Sequence
  Description of Artificial Sequence: Synthetic peptide
QIYPGIKVR

SEQ ID NO: 4732 - protein, 9 aa, Artificial Sequence
  Description of Artificial Sequence: Synthetic peptide
ATLYCVHQR

SEQ ID NO: 4733 - protein, 11 aa, Artificial Sequence
  Description of Artificial Sequence: Synthetic peptide
RVIETIQRAFR

SEQ ID NO: 4734 - protein, 10 aa, Artificial Sequence
  Description of Artificial Sequence: Synthetic peptide
KIKPPLPSVR

SEQ ID NO: 4735 - protein, 11 aa, Artificial Sequence
  Description of Artificial Sequence: Synthetic peptide
ITKGLGISYGR

SEQ ID NO: 4736 - protein, 11 aa, Artificial Sequence
  Description of Artificial Sequence: Synthetic peptide
RVIEIVQRTFR

SEQ ID NO: 4737 - protein, 11 aa, Artificial Sequence
  Description of Artificial Sequence: Synthetic peptide
TVNDIQKLVGK

SEQ ID NO: 4738 - protein, 9 aa, Artificial Sequence
  Description of Artificial Sequence: Synthetic peptide
KGLGISYGR

SEQ ID NO: 4739 - protein, 11 aa, Artificial Sequence
  Description of Artificial Sequence: Synthetic peptide
KGRPGNFLQSR

SEQ ID NO: 4740 - protein, 10 aa, Artificial Sequence
  Description of Artificial Sequence: Synthetic peptide
LGKAGYVTNR

SEQ ID NO: 4741 - protein, 9 aa, Artificial Sequence
  Description of Artificial Sequence: Synthetic peptide
AIRNAILGR

SEQ ID NO: 4742 - protein, 9 aa, Artificial Sequence
  Description of Artificial Sequence: Synthetic peptide
GTNGTEVFR

SEQ ID NO: 4743 - protein, 9 aa, Artificial Sequence
  Description of Artificial Sequence: Synthetic peptide
RQIHSISER

SEQ ID NO: 4744 - protein, 9 aa, Artificial Sequence
  Description of Artificial Sequence: Synthetic peptide
RLIDRIRER

SEQ ID NO: 4745 - protein, 9 aa, Artificial Sequence
  Description of Artificial Sequence: Synthetic peptide
VYYGVPVWR

SEQ ID NO: 4746 - protein, 9 aa, Artificial Sequence
  Description of Artificial Sequence: Synthetic peptide
SVTLTVQAR

SEQ ID NO: 4747 - protein, 9 aa, Artificial Sequence
  Description of Artificial Sequence: Synthetic peptide
ILNIPTRIR

SEQ ID NO: 4748 - protein, 8 aa, Artificial Sequence
  Description of Artificial Sequence: Synthetic peptide
AVLSIVNR

SEQ ID NO: 4749 - protein, 11 aa, Artificial Sequence
  Description of Artificial Sequence: Synthetic peptide
VGPTPVNIIGR

SEQ ID NO: 4750 - protein, 10 aa, Artificial Sequence
  Description of Artificial Sequence: Synthetic peptide
LSKQPTSQLR

SEQ ID NO: 4751 - protein, 11 aa, Artificial Sequence
  Description of Artificial Sequence: Synthetic peptide
VTSAPAIMMQR

SEQ ID NO: 4752 - protein, 11 aa, Artificial Sequence
  Description of Artificial Sequence: Synthetic peptide
ITKALGISYGR

SEQ ID NO: 4753 - protein, 11 aa, Artificial Sequence
  Description of Artificial Sequence: Synthetic peptide
SSNITGLLLTR

SEQ ID NO: 4754 - protein, 8 aa, Artificial Sequence
  Description of Artificial Sequence: Synthetic peptide
RVIEIVQR

SEQ ID NO: 4755 - protein, 10 aa, Artificial Sequence
  Description of Artificial Sequence: Synthetic peptide
LSKQPTSQPR

SEQ ID NO: 4756 - protein, 10 aa, Artificial Sequence
  Description of Artificial Sequence: Synthetic peptide
VTIGKIGNMR

SEQ ID NO: 4757 - protein, 9 aa, Artificial Sequence
  Description of Artificial Sequence: Synthetic peptide
QIYAGIKVR

SEQ ID NO: 4758 - protein, 9 aa, Artificial Sequence
  Description of Artificial Sequence: Synthetic peptide
IVNRVRQGY

SEQ ID NO: 4759 - protein, 9 aa, Artificial Sequence
  Description of Artificial Sequence: Synthetic peptide
ITKGLGISY

SEQ ID NO: 4760 - protein, 9 aa, Artificial Sequence
  Description of Artificial Sequence: Synthetic peptide
KNNPVSQNY

SEQ ID NO: 4761 - protein, 10 aa, Artificial Sequence
  Description of Artificial Sequence: Synthetic peptide
ITMGPGKVYY

SEQ ID NO: 4762 - protein, 10 aa, Artificial Sequence
  Description of Artificial Sequence: Synthetic peptide
ITMGPGRVYY

SEQ ID NO: 4763 - protein, 11 aa, Artificial Sequence
  Description of Artificial Sequence: Synthetic peptide
ETFYVDGAANR

SEQ ID NO: 4764 - protein, 10 aa, Artificial Sequence
  Description of Artificial Sequence: Synthetic peptide
DNSDIKVVPR

SEQ ID NO: 4765 - protein, 9 aa, Artificial Sequence
  Description of Artificial Sequence: Synthetic peptide
DTLNQIVGK

SEQ ID NO: 4766 - protein, 11 aa, Artificial Sequence
  Description of Artificial Sequence: Synthetic peptide
DTLNQIVGKLR

SEQ ID NO: 4767 - protein, 11 aa, Artificial Sequence
  Description of Artificial Sequence: Synthetic peptide
VTNSATIMMQR

SEQ ID NO: 4768 - protein, 11 aa, Artificial Sequence
  Description of Artificial Sequence: Synthetic peptide
DVKQLTEAVQK

SEQ ID NO: 4769 - protein, 9 aa, Artificial Sequence
  Description of Artificial Sequence: Synthetic peptide
NSATIMMQR

SEQ ID NO: 4770 - protein, 11 aa, Artificial Sequence
  Description of Artificial Sequence: Synthetic peptide
ENLAFPQGKAR

SEQ ID NO: 4771 - protein, 9 aa, Artificial Sequence
  Description of Artificial Sequence: Synthetic peptide
QARVLAVER

SEQ ID NO: 4772 - protein, 9 aa, Artificial Sequence
  Description of Artificial Sequence: Synthetic peptide
NTLGQIVKK

SEQ ID NO: 4773 - protein, 9 aa, Artificial Sequence
  Description of Artificial Sequence: Synthetic peptide
QARILAVER

SEQ ID NO: 4774 - protein, 9 aa, Artificial Sequence
  Description of Artificial Sequence: Synthetic peptide
EGLIYSQQR

SEQ ID NO: 4775 - protein, 9 aa, Artificial Sequence
  Description of Artificial Sequence: Synthetic peptide
MVHQAISPR

SEQ ID NO: 4776 - protein, 9 aa, Artificial Sequence
  Description of Artificial Sequence: Synthetic peptide
DTWEKIRLR

SEQ ID NO: 4777 - protein, 11 aa, Artificial Sequence
  Description of Artificial Sequence: Synthetic peptide
ETFYVDGAANR

SEQ ID NO: 4778 - protein, 9 aa, Artificial Sequence
  Description of Artificial Sequence: Synthetic peptide
ETVDIHCIR

SEQ ID NO: 4779 - protein, 9 aa, Artificial Sequence
  Description of Artificial Sequence: Synthetic peptide
ESVEINCTR

SEQ ID NO: 4780 - protein, 9 aa, Artificial Sequence
  Description of Artificial Sequence: Synthetic peptide
EAKWNNTLR

SEQ ID NO: 4781 - protein, 9 aa, Artificial Sequence
  Description of Artificial Sequence: Synthetic peptide
MVHQAISPR

SEQ ID NO: 4782 - protein, 9 aa, Artificial Sequence
  Description of Artificial Sequence: Synthetic peptide
NSATIMMQR

SEQ ID NO: 4783 - protein, 10 aa, Artificial Sequence
  Description of Artificial Sequence: Synthetic peptide
DNSDIKVVPR

SEQ ID NO: 4784 - protein, 11 aa, Artificial Sequence
  Description of Artificial Sequence: Synthetic peptide
MYAPPISGQIR

SEQ ID NO: 4785 - protein, 11 aa, Artificial Sequence
  Description of Artificial Sequence: Synthetic peptide
EIFRPGGGNMR

SEQ ID NO: 4786 - protein, 9 aa, Artificial Sequence
  Description of Artificial Sequence: Synthetic peptide
QARVLAVER

SEQ ID NO: 4787 - protein, 9 aa, Artificial Sequence
  Description of Artificial Sequence: Synthetic peptide
QARILAVER

SEQ ID NO: 4788 - protein, 9 aa, Artificial Sequence
  Description of Artificial Sequence: Synthetic peptide
FYVDGAANR

SEQ ID NO: 4789 - protein, 11 aa, Artificial Sequence
  Description of Artificial Sequence: Synthetic peptide
VTNSATIMMQR

SEQ ID NO: 4790 - protein, 10 aa, Artificial Sequence
  Description of Artificial Sequence: Synthetic peptide
TSAPAIMMQR

SEQ ID NO: 4791 - protein, 11 aa, Artificial Sequence
  Description of Artificial Sequence: Synthetic peptide
MYAPPIGGQIR

SEQ ID NO: 4792 - protein, 9 aa, Artificial Sequence
  Description of Artificial Sequence: Synthetic peptide
EYRKILRQR

SEQ ID NO: 4793 - protein, 11 aa, Artificial Sequence
  Description of Artificial Sequence: Synthetic peptide
TVNDIQKLVGK

SEQ ID NO: 4794 - protein, 9 aa, Artificial Sequence
  Description of Artificial Sequence: Synthetic peptide
SNFTGATVR

SEQ ID NO: 4795 - protein, 11 aa, Artificial Sequence
  Description of Artificial Sequence: Synthetic peptide
EVKDTKEALEK

SEQ ID NO: 4796 - protein, 9 aa, Artificial Sequence
  Description of Artificial Sequence: Synthetic peptide
TSVEINCTR

SEQ ID NO: 4797 - protein, 9 aa, Artificial Sequence
  Description of Artificial Sequence: Synthetic peptide
QARVLAIER

SEQ ID NO: 4798 - protein, 9 aa, Artificial Sequence
  Description of Artificial Sequence: Synthetic peptide
ELYPLTSLR

SEQ ID NO: 4799 - protein, 8 aa, Artificial Sequence
  Description of Artificial Sequence: Synthetic peptide
HSRIGVTR

SEQ ID NO: 4800 - protein, 9 aa, Artificial Sequence
  Description of Artificial Sequence: Synthetic peptide
NSDIKVVPR

SEQ ID NO: 4801 - protein, 9 aa, Artificial Sequence
  Description of Artificial Sequence: Synthetic peptide
FTVLSIVNR

SEQ ID NO: 4802 - protein, 9 aa, Artificial Sequence
  Description of Artificial Sequence: Synthetic peptide
EGLIYSQQR

SEQ ID NO: 4803 - protein, 10 aa, Artificial Sequence
  Description of Artificial Sequence: Synthetic peptide
LSKQPTSQPR

SEQ ID NO: 4804 - protein, 8 aa, Artificial Sequence
  Description of Artificial Sequence: Synthetic peptide
MTLTVQAR

SEQ ID NO: 4805 - protein, 9 aa, Artificial Sequence
  Description of Artificial Sequence: Synthetic peptide
SVIGWPTVR

SEQ ID NO: 4806 - protein, 9 aa, Artificial Sequence
  Description of Artificial Sequence: Synthetic peptide
QIYPGIKVR

SEQ ID NO: 4807 - protein, 11 aa, Artificial Sequence
  Description of Artificial Sequence: Synthetic peptide
DTLNQIVGKLR

SEQ ID NO: 4808 - protein, 10 aa, Artificial Sequence
  Description of Artificial Sequence: Synthetic peptide
SFQTRLPTQR

SEQ ID NO: 4809 - protein, 10 aa, Artificial Sequence
  Description of Artificial Sequence: Synthetic peptide
EVFRPGGGNM

SEQ ID NO: 4810 - protein, 9 aa, Artificial Sequence
  Description of Artificial Sequence: Synthetic peptide
QIYAGIKVR

SEQ ID NO: 4811 - protein, 9 aa, Artificial Sequence
  Description of Artificial Sequence: Synthetic peptide
SFNITTSIR

SEQ ID NO: 4812 - protein, 9 aa, Artificial Sequence
  Description of Artificial Sequence: Synthetic peptide
ITTTIKNKR

SEQ ID NO: 4813 - protein, 9 aa, Artificial Sequence
  Description of Artificial Sequence: Synthetic peptide
EYRKILKQK

SEQ ID NO: 4814 - protein, 10 aa, Artificial Sequence
  Description of Artificial Sequence: Synthetic peptide
SFQTHLPTPR

SEQ ID NO: 4815 - protein, 10 aa, Artificial Sequence
  Description of Artificial Sequence: Synthetic peptide
ELKKIIGQVR

SEQ ID NO: 4816 - protein, 10 aa, Artificial Sequence
  Description of Artificial Sequence: Synthetic peptide
LPKQPASQPR

SEQ ID NO: 4817 - protein, 8 aa, Artificial Sequence
  Description of Artificial Sequence: Synthetic peptide
MALTVQAR

SEQ ID NO: 4818 - protein, 9 aa, Artificial Sequence
  Description of Artificial Sequence: Synthetic peptide
MNNNNNSYR

SEQ ID NO: 4819 - protein, 9 aa, Artificial Sequence
  Description of Artificial Sequence: Synthetic peptide
ENNSTEIFR

SEQ ID NO: 4820 - protein, 8 aa, Artificial Sequence
  Description of Artificial Sequence: Synthetic peptide
TVLSIVNR

SEQ ID NO: 4821 - protein, 9 aa, Artificial Sequence
  Description of Artificial Sequence: Synthetic peptide
SFNISTSIR

SEQ ID NO: 4822 - protein, 10 aa, Artificial Sequence
  Description of Artificial Sequence: Synthetic peptide
EVHIPLGDAR

SEQ ID NO: 4823 - protein, 11 aa, Artificial Sequence
  Description of Artificial Sequence: Synthetic peptide
VTSAPAIMMQR

SEQ ID NO: 4824 - protein, 9 aa, Artificial Sequence
  Description of Artificial Sequence: Synthetic peptide
FNLPPIVAK

SEQ ID NO: 4825 - protein, 11 aa, Artificial Sequence
  Description of Artificial Sequence: Synthetic peptide
ENLAFPQGKAR

SEQ ID NO: 4826 - protein, 10 aa, Artificial Sequence
  Description of Artificial Sequence: Synthetic peptide
EIFRPGGGNM

SEQ ID NO: 4827 - protein, 9 aa, Artificial Sequence
  Description of Artificial Sequence: Synthetic peptide
NTLGQIVKK

SEQ ID NO: 4828 - protein, 10 aa, Artificial Sequence
  Description of Artificial Sequence: Synthetic peptide
LSKQPTSQLR

SEQ ID NO: 4829 - protein, 8 aa, Artificial Sequence
  Description of Artificial Sequence: Synthetic peptide
HYESPHPR

SEQ ID NO: 4830 - protein, 9 aa, Artificial Sequence
  Description of Artificial Sequence: Synthetic peptide
SVTLTVQAR

SEQ ID NO: 4831 - protein, 11 aa, Artificial Sequence
  Description of Artificial Sequence: Synthetic peptide
EPQEYPLASLR

SEQ ID NO: 4832 - protein, 9 aa, Artificial Sequence
  Description of Artificial Sequence: Synthetic peptide
DTLNQIVGK

SEQ ID NO: 4833 - protein, 11 aa, Artificial Sequence
  Description of Artificial Sequence: Synthetic peptide
ETFYVDGAANR

SEQ ID NO: 4834 - protein, 9 aa, Artificial Sequence
  Description of Artificial Sequence: Synthetic peptide
NSATIMMQR

SEQ ID NO: 4835 - protein, 9 aa, Artificial Sequence
  Description of Artificial Sequence: Synthetic peptide
ESVEINCTR

SEQ ID NO: 4836 - protein, 10 aa, Artificial Sequence
  Description of Artificial Sequence: Synthetic peptide
TSAPAIMMQR

SEQ ID NO: 4837 - protein, 9 aa, Artificial Sequence
  Description of Artificial Sequence: Synthetic peptide
TSVEINCTR

SEQ ID NO: 4838 - protein, 10 aa, Artificial Sequence
  Description of Artificial Sequence: Synthetic peptide
DNSDIKVVPR

SEQ ID NO: 4839 - protein, 9 aa, Artificial Sequence
  Description of Artificial Sequence: Synthetic peptide
DTLNQIVGK

SEQ ID NO: 4840 - protein, 9 aa, Artificial Sequence
  Description of Artificial Sequence: Synthetic peptide
ETVDIHCIR

SEQ ID NO: 4841 - protein, 11 aa, Artificial Sequence
  Description of Artificial Sequence: Synthetic peptide
TTGEIIGDIRR

SEQ ID NO: 4842 - protein, 10 aa, Artificial Sequence
  Description of Artificial Sequence: Synthetic peptide
TTGEIIGDIR

SEQ ID NO: 4843 - protein, 11 aa, Artificial Sequence
  Description of Artificial Sequence: Synthetic peptide
TVNDIQKLVGK

SEQ ID NO: 4844 - protein, 9 aa, Artificial Sequence
  Description of Artificial Sequence: Synthetic peptide
NTLGQIVKK

SEQ ID NO: 4845 - protein, 11 aa, Artificial Sequence
  Description of Artificial Sequence: Synthetic peptide
EIFRPGGGNMR

SEQ ID NO: 4846 - protein, 11 aa, Artificial Sequence
  Description of Artificial Sequence: Synthetic peptide
VTSAPAIMMQR

SEQ ID NO: 4847 - protein, 11 aa, Artificial Sequence
  Description of Artificial Sequence: Synthetic peptide
EVFRPGGGNMK

SEQ ID NO: 4848 - protein, 9 aa, Artificial Sequence
  Description of Artificial Sequence: Synthetic peptide
NSATIMMQK

SEQ ID NO: 4849 - protein, 9 aa, Artificial Sequence
  Description of Artificial Sequence: Synthetic peptide
SVTLTVQAR

SEQ ID NO: 4850 - protein, 10 aa, Artificial Sequence
  Description of Artificial Sequence: Synthetic peptide
TTGQIIGDIR

SEQ ID NO: 4851 - protein, 9 aa, Artificial Sequence
  Description of Artificial Sequence: Synthetic peptide
SNFTGATVR

SEQ ID NO: 4852 - protein, 10 aa, Artificial Sequence
  Description of Artificial Sequence: Synthetic peptide
NTSVEINCTR

SEQ ID NO: 4853 - protein, 9 aa, Artificial Sequence
  Description of Artificial Sequence: Synthetic peptide
GVAPTTAKR

SEQ ID NO: 4854 - protein, 11 aa, Artificial Sequence
  Description of Artificial Sequence: Synthetic peptide
VTNSATIMMQR

SEQ ID NO: 4855 - protein, 9 aa, Artificial Sequence
  Description of Artificial Sequence: Synthetic peptide
SVIGWPTVR

SEQ ID NO: 4856 - protein, 9 aa, Artificial Sequence
  Description of Artificial Sequence: Synthetic peptide
SAPAIMMQR

SEQ ID NO: 4857 - protein, 9 aa, Artificial Sequence
  Description of Artificial Sequence: Synthetic peptide
FTVLSIVNR

SEQ ID NO: 4858 - protein, 10 aa, Artificial Sequence
  Description of Artificial Sequence: Synthetic peptide
EVNIVTDSQY

SEQ ID NO: 4859 - protein, 9 aa, Artificial Sequence
  Description of Artificial Sequence: Synthetic peptide
EPVEINCTR

SEQ ID NO: 4860 - protein, 9 aa, Artificial Sequence
  Description of Artificial Sequence: Synthetic peptide
NSGAIMMQK

SEQ ID NO: 4861 - protein, 9 aa, Artificial Sequence
  Description of Artificial Sequence: Synthetic peptide
NSDIKVVPR

SEQ ID NO: 4862 - protein, 10 aa, Artificial Sequence
  Description of Artificial Sequence: Synthetic peptide
TNSGAIMMQK

SEQ ID NO: 4863 - protein, 10 aa, Artificial Sequence
  Description of Artificial Sequence: Synthetic peptide
TNSATIMMQR

SEQ ID NO: 4864 - protein, 11 aa, Artificial Sequence
  Description of Artificial Sequence: Synthetic peptide
DVKQLTEAVQK

SEQ ID NO: 4865 - protein, 10 aa, Artificial Sequence
  Description of Artificial Sequence: Synthetic peptide
DCFSDSAIRK

SEQ ID NO: 4866 - protein, 9 aa, Artificial Sequence
  Description of Artificial Sequence: Synthetic peptide
EASLVIKTY

SEQ ID NO: 4867 - protein, 9 aa, Artificial Sequence
  Description of Artificial Sequence: Synthetic peptide
FAVLSIVNR

SEQ ID NO: 4868 - protein, 11 aa, Artificial Sequence
  Description of Artificial Sequence: Synthetic peptide
PAADGVGPVSR

SEQ ID NO: 4869 - protein, 10 aa, Artificial Sequence
  Description of Artificial Sequence: Synthetic peptide
ASVTLTVQAR

SEQ ID NO: 4870 - protein, 10 aa, Artificial Sequence
  Description of Artificial Sequence: Synthetic peptide
ATGEIIGDIR

SEQ ID NO: 4871 - protein, 11 aa, Artificial Sequence
  Description of Artificial Sequence: Synthetic peptide
NGSNFTGATVR

SEQ ID NO: 4872 - protein, 9 aa, Artificial Sequence
  Description of Artificial Sequence: Synthetic peptide
NITGLLLTR

SEQ ID NO: 4873 - protein, 10 aa, Artificial Sequence
  Description of Artificial Sequence: Synthetic peptide
DTWTVNDIQK

SEQ ID NO: 4874 - protein, 10 aa, Artificial Sequence
  Description of Artificial Sequence: Synthetic peptide
EVFRPGGGNM

SEQ ID NO: 4875 - protein, 9 aa, Artificial Sequence
  Description of Artificial Sequence: Synthetic peptide
MVHQAISPR

SEQ ID NO: 4876 - protein, 10 aa, Artificial Sequence
  Description of Artificial Sequence: Synthetic peptide
DIIATDIQTK

SEQ ID NO: 4877 - protein, 11 aa, Artificial Sequence
  Description of Artificial Sequence: Synthetic peptide
TAIAVAEGTDR

SEQ ID NO: 4878 - protein, 11 aa, Artificial Sequence
  Description of Artificial Sequence: Synthetic peptide
VVTLTDTTNQK

SEQ ID NO: 4879 - protein, 10 aa, Artificial Sequence
  Description of Artificial Sequence: Synthetic peptide
ASMTLTVQAR

SEQ ID NO: 4880 - protein, 11 aa, Artificial Sequence
  Description of Artificial Sequence: Synthetic peptide
RVIEVVQGACR

SEQ ID NO: 4881 - protein, 11 aa, Artificial Sequence
  Description of Artificial Sequence: Synthetic peptide
VGPTPVNIIGR

SEQ ID NO: 4882 - protein, 9 aa, Artificial Sequence
  Description of Artificial Sequence: Synthetic peptide
TPAGFAILK

SEQ ID NO: 4883 - protein, 10 aa, Artificial Sequence
  Description of Artificial Sequence: Synthetic peptide
VTIGKIGNMR

SEQ ID NO: 4884 - protein, 9 aa, Artificial Sequence
  Description of Artificial Sequence: Synthetic peptide
GTNGTEVFR

SEQ ID NO: 4885 - protein, 9 aa, Artificial Sequence
  Description of Artificial Sequence: Synthetic peptide
ITTDISNKK

SEQ ID NO: 4886 - protein, 11 aa, Artificial Sequence
  Description of Artificial Sequence: Synthetic peptide
IGPTPVNIIGR

SEQ ID NO: 4887 - protein, 11 aa, Artificial Sequence
  Description of Artificial Sequence: Synthetic peptide
PAADGVGAASR

SEQ ID NO: 4888 - protein, 9 aa, Artificial Sequence
  Description of Artificial Sequence: Synthetic peptide
ITTTIKNKR

SEQ ID NO: 4889 - protein, 10 aa, Artificial Sequence
  Description of Artificial Sequence: Synthetic peptide
EIFRPGGGNM

SEQ ID NO: 4890 - protein, 9 aa, Artificial Sequence
  Description of Artificial Sequence: Synthetic peptide
ETAYFLLKL

SEQ ID NO: 4891 - protein, 10 aa, Artificial Sequence
  Description of Artificial Sequence: Synthetic peptide
ETYGDTWVGV

SEQ ID NO: 4892 - protein, 9 aa, Artificial Sequence
  Description of Artificial Sequence: Synthetic peptide
TVLSIVNRV

SEQ ID NO: 4893 - protein, 9 aa, Artificial Sequence
  Description of Artificial Sequence: Synthetic peptide
IVSQIIEQL

SEQ ID NO: 4894 - protein, 9 aa, Artificial Sequence
  Description of Artificial Sequence: Synthetic peptide
LVSQIIEQL

SEQ ID NO: 4895 - protein, 9 aa, Artificial Sequence
  Description of Artificial Sequence: Synthetic peptide
NTIAVLYCV

SEQ ID NO: 4896 - protein, 9 aa, Artificial Sequence
  Description of Artificial Sequence: Synthetic peptide
VVAGIIAIV

SEQ ID NO: 4897 - protein, 9 aa, Artificial Sequence
  Description of Artificial Sequence: Synthetic peptide
NTKTIIVQL

SEQ ID NO: 4898 - protein, 9 aa, Artificial Sequence
  Description of Artificial Sequence: Synthetic peptide
NTSVITQAC

SEQ ID NO: 4899 - protein, 9 aa, Artificial Sequence
  Description of Artificial Sequence: Synthetic peptide
YTAFTIPSV

SEQ ID NO: 4900 - protein, 9 aa, Artificial Sequence
  Description of Artificial Sequence: Synthetic peptide
VVAAIIAIV

SEQ ID NO: 4901 - protein, 9 aa, Artificial Sequence
  Description of Artificial Sequence: Synthetic peptide
TVNDIQKLV

SEQ ID NO: 4902 - protein, 9 aa, Artificial Sequence
  Description of Artificial Sequence: Synthetic peptide
LVSQIIEEL

SEQ ID NO: 4903 - protein, 9 aa, Artificial Sequence
  Description of Artificial Sequence: Synthetic peptide
EVIPMFAAL

SEQ ID NO: 4904 - protein, 10 aa, Artificial Sequence
  Description of Artificial Sequence: Synthetic peptide
EISALVEMGV

SEQ ID NO: 4905 - protein, 9 aa, Artificial Sequence
  Description of Artificial Sequence: Synthetic peptide
NTIATLYCV

SEQ ID NO: 4906 - protein, 9 aa, Artificial Sequence
  Description of Artificial Sequence: Synthetic peptide
TIVAIVALV

SEQ ID NO: 4907 - protein, 9 aa, Artificial Sequence
  Description of Artificial Sequence: Synthetic peptide
LVVAIIIAI

SEQ ID NO: 4908 - protein, 10 aa, Artificial Sequence
  Description of Artificial Sequence: Synthetic peptide
ETYGDTWAGV

SEQ ID NO: 4909 - protein, 9 aa, Artificial Sequence
  Description of Artificial Sequence: Synthetic peptide
IVLSIVNRV

SEQ ID NO: 4910 - protein, 9 aa, Artificial Sequence
  Description of Artificial Sequence: Synthetic peptide
YTSLIHSLI

SEQ ID NO: 4911 - protein, 9 aa, Artificial Sequence
  Description of Artificial Sequence: Synthetic peptide
ITTSIRNKL

SEQ ID NO: 4912 - protein, 9 aa, Artificial Sequence
  Description of Artificial Sequence: Synthetic peptide
YTAFTIPSI

SEQ ID NO: 4913 - protein, 9 aa, Artificial Sequence
  Description of Artificial Sequence: Synthetic peptide
NTVATLYCV

SEQ ID NO: 4914 - protein, 9 aa, Artificial Sequence
  Description of Artificial Sequence: Synthetic peptide
DTITLPCRI

SEQ ID NO: 4915 - protein, 11 aa, Artificial Sequence
  Description of Artificial Sequence: Synthetic peptide
EVIPLTEEAEL

SEQ ID NO: 4916 - protein, 9 aa, Artificial Sequence
  Description of Artificial Sequence: Synthetic peptide
TVLSIMNRV

SEQ ID NO: 4917 - protein, 9 aa, Artificial Sequence
  Description of Artificial Sequence: Synthetic peptide
RVIEVLQRV

SEQ ID NO: 4918 - protein, 9 aa, Artificial Sequence
  Description of Artificial Sequence: Synthetic peptide
TTSTLQEQI

SEQ ID NO: 4919 - protein, 9 aa, Artificial Sequence
  Description of Artificial Sequence: Synthetic peptide
SAVSLFNAI

SEQ ID NO: 4920 - protein, 11 aa, Artificial Sequence
  Description of Artificial Sequence: Synthetic peptide
EVVPLTKEAEL

SEQ ID NO: 4921 - protein, 9 aa, Artificial Sequence
  Description of Artificial Sequence: Synthetic peptide
ENTSLLHPV

SEQ ID NO: 4922 - protein, 9 aa, Artificial Sequence
  Description of Artificial Sequence: Synthetic peptide
EVIPMFSAL

SEQ ID NO: 4923 - protein, 9 aa, Artificial Sequence
  Description of Artificial Sequence: Synthetic peptide
EIIGDIRQA

SEQ ID NO: 4924 - protein, 9 aa, Artificial Sequence
  Description of Artificial Sequence: Synthetic peptide
TVSFNFPQV

SEQ ID NO: 4925 - protein, 9 aa, Artificial Sequence
  Description of Artificial Sequence: Synthetic peptide
EVIPLTEEA

SEQ ID NO: 4926 - protein, 9 aa, Artificial Sequence
  Description of Artificial Sequence: Synthetic peptide
QNYPIVQNI

SEQ ID NO: 4927 - protein, 9 aa, Artificial Sequence
  Description of Artificial Sequence: Synthetic peptide
AVLSIVNRV

SEQ ID NO: 4928 - protein, 9 aa, Artificial Sequence
  Description of Artificial Sequence: Synthetic peptide
GAASVTLTV

SEQ ID NO: 4929 - protein, 11 aa, Artificial Sequence
  Description of Artificial Sequence: Synthetic peptide
ETFYVDGAANR

SEQ ID NO: 4930 - protein, 10 aa, Artificial Sequence
  Description of Artificial Sequence: Synthetic peptide
EVFRPGGGNM

SEQ ID NO: 4931 - protein, 9 aa, Artificial Sequence
  Description of Artificial Sequence: Synthetic peptide
DVKQLTEAV

SEQ ID NO: 4932 - protein, 9 aa, Artificial Sequence
  Description of Artificial Sequence: Synthetic peptide
AAVDLSHFL

SEQ ID NO: 4933 - protein, 9 aa, Artificial Sequence
  Description of Artificial Sequence: Synthetic peptide
LVNQIIEQL

SEQ ID NO: 4934 - protein, 9 aa, Artificial Sequence
  Description of Artificial Sequence: Synthetic peptide
IVTRIVELL

SEQ ID NO: 4935 - protein, 9 aa, Artificial Sequence
  Description of Artificial Sequence: Synthetic peptide
IVALVVAAI

SEQ ID NO: 4936 - protein, 9 aa, Artificial Sequence
  Description of Artificial Sequence: Synthetic peptide
NAKTIIVQL

SEQ ID NO: 4937 - protein, 10 aa, Artificial Sequence
  Description of Artificial Sequence: Synthetic peptide
IVSQIIEQLI

SEQ ID NO: 4938 - protein, 9 aa, Artificial Sequence
  Description of Artificial Sequence: Synthetic peptide
YTSLIYTLI

SEQ ID NO: 4939 - protein, 10 aa, Artificial Sequence
  Description of Artificial Sequence: Synthetic peptide
LVSQIIEQLI

SEQ ID NO: 4940 - protein, 9 aa, Artificial Sequence
  Description of Artificial Sequence: Synthetic peptide
MTHNPPIPV

SEQ ID NO: 4941 - protein, 10 aa, Artificial Sequence
  Description of Artificial Sequence: Synthetic peptide
EVGFPVKPQV

SEQ ID NO: 4942 - protein, 10 aa, Artificial Sequence
  Description of Artificial Sequence: Synthetic peptide
ETAEGCRQLL

SEQ ID NO: 4943 - protein, 9 aa, Artificial Sequence
  Description of Artificial Sequence: Synthetic peptide
TTGEIIGDI

SEQ ID NO: 4944 - protein, 10 aa, Artificial Sequence
  Description of Artificial Sequence: Synthetic peptide
EIVSQIIEQL

SEQ ID NO: 4945 - protein, 9 aa, Artificial Sequence
  Description of Artificial Sequence: Synthetic peptide
QNYPIVQNL

SEQ ID NO: 4946 - protein, 9 aa, Artificial Sequence
  Description of Artificial Sequence: Synthetic peptide
YTTQVDPDL

SEQ ID NO: 4947 - protein, 9 aa, Artificial Sequence
  Description of Artificial Sequence: Synthetic peptide
VVAAILAIV

SEQ ID NO: 4948 - protein, 9 aa, Artificial Sequence
  Description of Artificial Sequence: Synthetic peptide
SPTSRELQV

SEQ ID NO: 4949 - protein, 9 aa, Artificial Sequence
  Description of Artificial Sequence: Synthetic peptide
SPAIFQSSM

SEQ ID NO: 4950 - protein, 9 aa, Artificial Sequence
  Description of Artificial Sequence: Synthetic peptide
SIRLVNGSL

SEQ ID NO: 4951 - protein, 9 aa, Artificial Sequence
  Description of Artificial Sequence: Synthetic peptide
SPLSFQTRL

SEQ ID NO: 4952 - protein, 9 aa, Artificial Sequence
  Description of Artificial Sequence: Synthetic peptide
SPLSFQTHL

SEQ ID NO: 4953 - protein, 10 aa, Artificial Sequence
  Description of Artificial Sequence: Synthetic peptide
RPAEPVPLQL

SEQ ID NO: 4954 - protein, 10 aa, Artificial Sequence
  Description of Artificial Sequence: Synthetic peptide
RPNNNTRKSI

SEQ ID NO: 4955 - protein, 9 aa, Artificial Sequence
  Description of Artificial Sequence: Synthetic peptide
SDSAIRNAL

SEQ ID NO: 4956 - protein, 9 aa, Artificial Sequence
  Description of Artificial Sequence: Synthetic peptide
YPLTSLRSL

SEQ ID NO: 4957 - protein, 8 aa, Artificial Sequence
  Description of Artificial Sequence: Synthetic peptide
KPVVSTQL

SEQ ID NO: 4958 - protein, 8 aa, Artificial Sequence
  Description of Artificial Sequence: Synthetic peptide
RPVVSTQL

SEQ ID NO: 4959 - protein, 9 aa, Artificial Sequence
  Description of Artificial Sequence: Synthetic peptide
ADRQGTVSF

SEQ ID NO: 4960 - protein, 10 aa, Artificial Sequence
  Description of Artificial Sequence: Synthetic peptide
SPIETVPVKL

SEQ ID NO: 4961 - protein, 9 aa, Artificial Sequence
  Description of Artificial Sequence: Synthetic peptide
RPMTYKGAL

SEQ ID NO: 4962 - protein, 10 aa, Artificial Sequence
  Description of Artificial Sequence: Synthetic peptide
SEAGATRISF

SEQ ID NO: 4963 - protein, 10 aa, Artificial Sequence
  Description of Artificial Sequence: Synthetic peptide
VPTDPNPQEL

SEQ ID NO: 4964 - protein, 9 aa, Artificial Sequence
  Description of Artificial Sequence: Synthetic peptide
SPAIFQCSM

SEQ ID NO: 4965 - protein, 9 aa, Artificial Sequence
  Description of Artificial Sequence: Synthetic peptide
LSKQPTSQL

SEQ ID NO: 4966 - protein, 10 aa, Artificial Sequence
  Description of Artificial Sequence: Synthetic peptide
EPNDGKNITL

SEQ ID NO: 4967 - protein, 9 aa, Artificial Sequence
  Description of Artificial Sequence: Synthetic peptide
VPLTKEAEL

SEQ ID NO: 4968 - protein, 9 aa, Artificial Sequence
  Description of Artificial Sequence: Synthetic peptide
TPQDLNTML

SEQ ID NO: 4969 - protein, 8 aa, Artificial Sequence
  Description of Artificial Sequence: Synthetic peptide
DSAIRNAL

SEQ ID NO: 4970 - protein, 9 aa, Artificial Sequence
  Description of Artificial Sequence: Synthetic peptide
ELKNSAVSL

SEQ ID NO: 4971 - protein, 9 aa, Artificial Sequence
  Description of Artificial Sequence: Synthetic peptide
TSLLHPVSL

SEQ ID NO: 4972 - protein, 8 aa, Artificial Sequence
  Description of Artificial Sequence: Synthetic peptide
DSAIRKAL

SEQ ID NO: 4973 - protein, 9 aa, Artificial Sequence
  Description of Artificial Sequence: Synthetic peptide
YPGIKVKQL

SEQ ID NO: 4974 - protein, 9 aa, Artificial Sequence
  Description of Artificial Sequence: Synthetic peptide
YPLTSLRSL

SEQ ID NO: 4975 - protein, 9 aa, Artificial Sequence
  Description of Artificial Sequence: Synthetic peptide
YPLTALKSL

SEQ ID NO: 4976 - protein, 9 aa, Artificial Sequence
  Description of Artificial Sequence: Synthetic peptide
VPLTKEAEL

SEQ ID NO: 4977 - protein, 9 aa, Artificial Sequence
  Description of Artificial Sequence: Synthetic peptide
DVKQLTEAV

SEQ ID NO: 4978 - protein, 8 aa, Artificial Sequence
  Description of Artificial Sequence: Synthetic peptide
IQKEKVYL

SEQ ID NO: 4979 - protein, 8 aa, Artificial Sequence
  Description of Artificial Sequence: Synthetic peptide
TTNQKTEL

SEQ ID NO: 4980 - protein, 9 aa, Artificial Sequence
  Description of Artificial Sequence: Synthetic peptide
QLQARILAV

SEQ ID NO: 4981 - protein, 8 aa, Artificial Sequence
  Description of Artificial Sequence: Synthetic peptide
HLKTAVQM

SEQ ID NO: 4982 - protein, 9 aa, Artificial Sequence
  Description of Artificial Sequence: Synthetic peptide
ELKSLFNTV

SEQ ID NO: 4983 - protein, 11 aa, Artificial Sequence
  Description of Artificial Sequence: Synthetic peptide
TQVDPELADQL

SEQ ID NO: 4984 - protein, 11 aa, Artificial Sequence
  Description of Artificial Sequence: Synthetic peptide
TQVDPGLADQL

SEQ ID NO: 4985 - protein, 11 aa, Artificial Sequence
  Description of Artificial Sequence: Synthetic peptide
TQVDPDLADQL

SEQ ID NO: 4986 - protein, 9 aa, Artificial Sequence
  Description of Artificial Sequence: Synthetic peptide
KQMAGDDCM

SEQ ID NO: 4987 - protein, 9 aa, Artificial Sequence
  Description of Artificial Sequence: Synthetic peptide
SQVTSAPAI

SEQ ID NO: 4988 - protein, 10 aa, Artificial Sequence
  Description of Artificial Sequence: Synthetic peptide
GQVRDQAEHL

SEQ ID NO: 4989 - protein, 10 aa, Artificial Sequence
  Description of Artificial Sequence: Synthetic peptide
GTQGVGDPQI

SEQ ID NO: 4990 - protein, 10 aa, Artificial Sequence
  Description of Artificial Sequence: Synthetic peptide
AQEEEGEVGF

SEQ ID NO: 4991 - protein, 9 aa, Artificial Sequence
  Description of Artificial Sequence: Synthetic peptide
AQEEEEVGF

SEQ ID NO: 4992 - protein, 9 aa, Artificial Sequence
  Description of Artificial Sequence: Synthetic peptide
GTDRVIETI

SEQ ID NO: 4993 - protein, 9 aa, Artificial Sequence
  Description of Artificial Sequence: Synthetic peptide
TQGVGDPQI

SEQ ID NO: 4994 - protein, 10 aa, Artificial Sequence
  Description of Artificial Sequence: Synthetic peptide
KQLTEAVQKI

SEQ ID NO: 4995 - protein, 9 aa, Artificial Sequence
  Description of Artificial Sequence: Synthetic peptide
AQEDEEVGF

SEQ ID NO: 4996 - protein, 9 aa, Artificial Sequence
  Description of Artificial Sequence: Synthetic peptide
SQVTSAPAI

SEQ ID NO: 4997 - protein, 9 aa, Artificial Sequence
  Description of Artificial Sequence: Synthetic peptide
GAASVTLTV

SEQ ID NO: 4998 - protein, 9 aa, Artificial Sequence
  Description of Artificial Sequence: Synthetic peptide
QLTEAVQKI

SEQ ID NO: 4999 - protein, 9 aa, Artificial Sequence
  Description of Artificial Sequence: Synthetic peptide
SQIYAGIKV

SEQ ID NO: 5000 - protein, 8 aa, Artificial Sequence
  Description of Artificial Sequence: Synthetic peptide
GQMVHQAI

SEQ ID NO: 5001 - protein, 9 aa, Artificial Sequence
  Description of Artificial Sequence: Synthetic peptide
SQIYPGIKV

SEQ ID NO: 5002 - protein, 9 aa, Artificial Sequence
  Description of Artificial Sequence: Synthetic peptide
GAASMALTV

SEQ ID NO: 5003 - protein, 9 aa, Artificial Sequence
  Description of Artificial Sequence: Synthetic peptide
QQHLLQLTV

SEQ ID NO: 5004 - protein, 9 aa, Artificial Sequence
  Description of Artificial Sequence: Synthetic peptide
VQKITTESI

SEQ ID NO: 5005 - protein, 9 aa, Artificial Sequence
  Description of Artificial Sequence: Synthetic peptide
GQVDCSPGI

SEQ ID NO: 5006 - protein, 9 aa, Artificial Sequence
  Description of Artificial Sequence: Synthetic peptide
SQVTNSATI

SEQ ID NO: 5007 - protein, 9 aa, Artificial Sequence
  Description of Artificial Sequence: Synthetic peptide
GAASMTLTV

SEQ ID NO: 5008 - protein, 9 aa, Artificial Sequence
  Description of Artificial Sequence: Synthetic peptide
VQKIATESI

SEQ ID NO: 5009 - protein, 9 aa, Artificial Sequence
  Description of Artificial Sequence: Synthetic peptide
VQLKEPVEI

SEQ ID NO: 5010 - protein, 9 aa, Artificial Sequence
  Description of Artificial Sequence: Synthetic peptide
GQGQWTYQI

SEQ ID NO: 5011 - protein, 9 aa, Artificial Sequence
  Description of Artificial Sequence: Synthetic peptide
AVLSIVNRV

SEQ ID NO: 5012 - protein, 11 aa, Artificial Sequence
  Description of Artificial Sequence: Synthetic peptide
AQAGPIAPGQI

SEQ ID NO: 5013 - protein, 9 aa, Artificial Sequence
  Description of Artificial Sequence: Synthetic peptide
VQLNTSVEI

SEQ ID NO: 5014 - protein, 9 aa, Artificial Sequence
  Description of Artificial Sequence: Synthetic peptide
GQLQPALQT

SEQ ID NO: 5015 - protein, 8 aa, Artificial Sequence
  Description of Artificial Sequence: Synthetic peptide
SQIIEQLI

SEQ ID NO: 5016 - protein, 9 aa, Artificial Sequence
  Description of Artificial Sequence: Synthetic peptide
GQISCSSNI

SEQ ID NO: 5017 - protein, 9 aa, Artificial Sequence
  Description of Artificial Sequence: Synthetic peptide
AILNIPTRI

SEQ ID NO: 5018 - protein, 10 aa, Artificial Sequence
  Description of Artificial Sequence: Synthetic peptide
RQYDQIPIEI

SEQ ID NO: 5019 - protein, 9 aa, Artificial Sequence
  Description of Artificial Sequence: Synthetic peptide
RVIEVLQRV

SEQ ID NO: 5020 - protein, 9 aa, Artificial Sequence
  Description of Artificial Sequence: Synthetic peptide
VLAEAMSQV

SEQ ID NO: 5021 - protein, 9 aa, Artificial Sequence
  Description of Artificial Sequence: Synthetic peptide
VQNIQGQMV

SEQ ID NO: 5022 - protein, 10 aa, Artificial Sequence
  Description of Artificial Sequence: Synthetic peptide
KQLTEAVQKI

SEQ ID NO: 5023 - protein, 8 aa, Artificial Sequence
  Description of Artificial Sequence: Synthetic peptide
NQIIEQLI

SEQ ID NO: 5024 - protein, 9 aa, Artificial Sequence
  Description of Artificial Sequence: Synthetic peptide
TQPIPIVAI

SEQ ID NO: 5025 - protein, 9 aa, Artificial Sequence
  Description of Artificial Sequence: Synthetic peptide
SQVTNSGAI

SEQ ID NO: 5026 - protein, 9 aa, Artificial Sequence
  Description of Artificial Sequence: Synthetic peptide
VVKIEPLGV

SEQ ID NO: 5027 - protein, 10 aa, Artificial Sequence
  Description of Artificial Sequence: Synthetic peptide
IQGQMVHQAI

SEQ ID NO: 5028 - protein, 9 aa, Artificial Sequence
  Description of Artificial Sequence: Synthetic peptide
GSNFTSTTV

SEQ ID NO: 5029 - protein, 9 aa, Artificial Sequence
  Description of Artificial Sequence: Synthetic peptide
VQLKESVEI

SEQ ID NO: 5030 - protein, 9 aa, Artificial Sequence
  Description of Artificial Sequence: Synthetic peptide
QNYPIVQNI

SEQ ID NO: 5031 - protein, 9 aa, Artificial Sequence
  Description of Artificial Sequence: Synthetic peptide
GQLQPSLQT

SEQ ID NO: 5032 - protein, 9 aa, Artificial Sequence
  Description of Artificial Sequence: Synthetic peptide
SQVSQNYPI

SEQ ID NO: 5033 - protein, 9 aa, Artificial Sequence
  Description of Artificial Sequence: Synthetic peptide
TVLSIVNRV

SEQ ID NO: 5034 - protein, 9 aa, Artificial Sequence
  Description of Artificial Sequence: Synthetic peptide
VQNMQGQMV

SEQ ID NO: 5035 - protein, 9 aa, Artificial Sequence
  Description of Artificial Sequence: Synthetic peptide
TQGVGSPQI

SEQ ID NO: 5036 - protein, 8 aa, Artificial Sequence
  Description of Artificial Sequence: Synthetic peptide
SQGVVESI

SEQ ID NO: 5037 - protein, 9 aa, Artificial Sequence
  Description of Artificial Sequence: Synthetic peptide
NQKTELQAI

SEQ ID NO: 5038 - protein, 9 aa, Artificial Sequence
  Description of Artificial Sequence: Synthetic peptide
YQLEKEPIV

SEQ ID NO: 5039 - protein, 9 aa, Artificial Sequence
  Description of Artificial Sequence: Synthetic peptide
GSNFTGATV

SEQ ID NO: 5040 - protein, 9 aa, Artificial Sequence
  Description of Artificial Sequence: Synthetic peptide
ALQDSGLEV

SEQ ID NO: 5041 - protein, 9 aa, Artificial Sequence
  Description of Artificial Sequence: Synthetic peptide
DRQTHQASL

SEQ ID NO: 5042 - protein, 9 aa, Artificial Sequence
  Description of Artificial Sequence: Synthetic peptide
ERYLQDQQL

SEQ ID NO: 5043 - protein, 8 aa, Artificial Sequence
  Description of Artificial Sequence: Synthetic peptide
DSAIRNAL

SEQ ID NO: 5044 - protein, 9 aa, Artificial Sequence
  Description of Artificial Sequence: Synthetic peptide
ERYLKDQQL

SEQ ID NO: 5045 - protein, 9 aa, Artificial Sequence
  Description of Artificial Sequence: Synthetic peptide
ERFALNPGL

SEQ ID NO: 5046 - protein, 8 aa, Artificial Sequence
  Description of Artificial Sequence: Synthetic peptide
IRLVNGSL

SEQ ID NO: 5047 - protein, 8 aa, Artificial Sequence
  Description of Artificial Sequence: Synthetic peptide
DSAIRNAL

SEQ ID NO: 5048 - protein, 9 aa, Artificial Sequence
  Description of Artificial Sequence: Synthetic peptide
ERYLKDQQL

SEQ ID NO: 5049 - protein, 9 aa, Artificial Sequence
  Description of Artificial Sequence: Synthetic peptide
ERYLQDQQL

SEQ ID NO: 5050 - protein, 8 aa, Artificial Sequence
  Description of Artificial Sequence: Synthetic peptide
LQAIHLAL

SEQ ID NO: 5051 - protein, 9 aa, Artificial Sequence
  Description of Artificial Sequence: Synthetic peptide
DRQTHQASL

SEQ ID NO: 5052 - protein, 8 aa, Artificial Sequence
  Description of Artificial Sequence: Synthetic peptide
GQMVHQAI

SEQ ID NO: 5053 - protein, 8 aa, Artificial Sequence
  Description of Artificial Sequence: Synthetic peptide
DSAIRKAL

SEQ ID NO: 5054 - protein, 9 aa, Artificial Sequence
  Description of Artificial Sequence: Synthetic peptide
IQELRGSAV

SEQ ID NO: 5055 - protein, 9 aa, Artificial Sequence
  Description of Artificial Sequence: Synthetic peptide
YPLTSLRSL

SEQ ID NO: 5056 - protein, 9 aa, Artificial Sequence
  Description of Artificial Sequence: Synthetic peptide
RDLERHGAL

SEQ ID NO: 5057 - protein, 8 aa, Artificial Sequence
  Description of Artificial Sequence: Synthetic peptide
IQKLVGKL

SEQ ID NO: 5058 - protein, 8 aa, Artificial Sequence
  Description of Artificial Sequence: Synthetic peptide
DLERHGAL

SEQ ID NO: 5059 - protein, 9 aa, Artificial Sequence
  Description of Artificial Sequence: Synthetic peptide
DGEERNITL

SEQ ID NO: 5060 - protein, 10 aa, Artificial Sequence
  Description of Artificial Sequence: Synthetic peptide
VQMNNNNNSY

SEQ ID NO: 5061 - protein, 9 aa, Artificial Sequence
  Description of Artificial Sequence: Synthetic peptide
ITKGLGISY

SEQ ID NO: 5062 - protein, 9 aa, Artificial Sequence
  Description of Artificial Sequence: Synthetic peptide
ITKALGISY

SEQ ID NO: 5063 - protein, 9 aa, Artificial Sequence
  Description of Artificial Sequence: Synthetic peptide
KQNPEIVIY

SEQ ID NO: 5064 - protein, 9 aa, Artificial Sequence
  Description of Artificial Sequence: Synthetic peptide
KQNPDIVIY

SEQ ID NO: 5065 - protein, 9 aa, Artificial Sequence
  Description of Artificial Sequence: Synthetic peptide
TMGPGKVYY

SEQ ID NO: 5066 - protein, 9 aa, Artificial Sequence
  Description of Artificial Sequence: Synthetic peptide
SQKQEPQEY

SEQ ID NO: 5067 - protein, 9 aa, Artificial Sequence
  Description of Artificial Sequence: Synthetic peptide
QMNNNNNSY

SEQ ID NO: 5068 - protein, 9 aa, Artificial Sequence
  Description of Artificial Sequence: Synthetic peptide
HIVSPSCEY

SEQ ID NO: 5069 - protein, 9 aa, Artificial Sequence
  Description of Artificial Sequence: Synthetic peptide
ITMGPGKVY

SEQ ID NO: 5070 - protein, 9 aa, Artificial Sequence
  Description of Artificial Sequence: Synthetic peptide
TQACPKVSF

SEQ ID NO: 5071 - protein, 9 aa, Artificial Sequence
  Description of Artificial Sequence: Synthetic peptide
KQITKIQNF

SEQ ID NO: 5072 - protein, 9 aa, Artificial Sequence
  Description of Artificial Sequence: Synthetic peptide
VQKIATESI

SEQ ID NO: 5073 - protein, 8 aa, Artificial Sequence
  Description of Artificial Sequence: Synthetic peptide
GQHIYETY

SEQ ID NO: 5074 - protein, 9 aa, Artificial Sequence
  Description of Artificial Sequence: Synthetic peptide
KQGQGQWTY

SEQ ID NO: 5075 - protein, 9 aa, Artificial Sequence
  Description of Artificial Sequence: Synthetic peptide
TQIGCTLNF

SEQ ID NO: 5076 - protein, 9 aa, Artificial Sequence
  Description of Artificial Sequence: Synthetic peptide
VLVNVTENF

SEQ ID NO: 5077 - protein, 10 aa, Artificial Sequence
  Description of Artificial Sequence: Synthetic peptide
GANRQGTVSF

SEQ ID NO: 5078 - protein, 9 aa, Artificial Sequence
  Description of Artificial Sequence: Synthetic peptide
TVLDVGDAY

SEQ ID NO: 5079 - protein, 9 aa, Artificial Sequence
  Description of Artificial Sequence: Synthetic peptide
TMGPGRVYY

SEQ ID NO: 5080 - protein, 11 aa, Artificial Sequence
  Description of Artificial Sequence: Synthetic peptide
IVPINNDNTSY

SEQ ID NO: 5081 - protein, 10 aa, Artificial Sequence
  Description of Artificial Sequence: Synthetic peptide
ILKEPVHGVY

SEQ ID NO: 5082 - protein, 9 aa, Artificial Sequence
  Description of Artificial Sequence: Synthetic peptide
VQKITTESI

SEQ ID NO: 5083 - protein, 9 aa, Artificial Sequence
  Description of Artificial Sequence: Synthetic peptide
ALVEMGVEM

SEQ ID NO: 5084 - protein, 9 aa, Artificial Sequence
  Description of Artificial Sequence: Synthetic peptide
ITMGPGRVY

SEQ ID NO: 5085 - protein, 9 aa, Artificial Sequence
  Description of Artificial Sequence: Synthetic peptide
PINNDNTSY

SEQ ID NO: 5086 - protein, 9 aa, Artificial Sequence
  Description of Artificial Sequence: Synthetic peptide
IQKQGQGQW

SEQ ID NO: 5087 - protein, 10 aa, Artificial Sequence
  Description of Artificial Sequence: Synthetic peptide
ITMGPGKVYY

SEQ ID NO: 5088 - protein, 9 aa, Artificial Sequence
  Description of Artificial Sequence: Synthetic peptide
ALVEICTEM

SEQ ID NO: 5089 - protein, 8 aa, Artificial Sequence
  Description of Artificial Sequence: Synthetic peptide
AVHVASGY

SEQ ID NO: 5090 - protein, 8 aa, Artificial Sequence
  Description of Artificial Sequence: Synthetic peptide
AELVVTTY

SEQ ID NO: 5091 - protein, 9 aa, Artificial Sequence
  Description of Artificial Sequence: Synthetic peptide
IQRGPGRAF

SEQ ID NO: 5092 - protein, 10 aa, Artificial Sequence
  Description of Artificial Sequence: Synthetic peptide
EQFNNNTIVF

SEQ ID NO: 5093 - protein, 9 aa, Artificial Sequence
  Description of Artificial Sequence: Synthetic peptide
LSKQPTSQL

SEQ ID NO: 5094 - protein, 9 aa, Artificial Sequence
  Description of Artificial Sequence: Synthetic peptide
HSNQVSQNY

SEQ ID NO: 5095 - protein, 9 aa, Artificial Sequence
  Description of Artificial Sequence: Synthetic peptide
ALAEICAEM

SEQ ID NO: 5096 - protein, 9 aa, Artificial Sequence
  Description of Artificial Sequence: Synthetic peptide
FLGAAGSTM

SEQ ID NO: 5097 - protein, 8 aa, Artificial Sequence
  Description of Artificial Sequence: Synthetic peptide
GQMVHQAI

SEQ ID NO: 5098 - protein, 9 aa, Artificial Sequence
  Description of Artificial Sequence: Synthetic peptide
KNNPVSQNY

SEQ ID NO: 5099 - protein, 10 aa, Artificial Sequence
  Description of Artificial Sequence: Synthetic peptide
ILKETVHGVY

SEQ ID NO: 5100 - protein, 11 aa, Artificial Sequence
  Description of Artificial Sequence: Synthetic peptide
IQKQGQGQWTY

SEQ ID NO: 5101 - protein, 10 aa, Artificial Sequence
  Description of Artificial Sequence: Synthetic peptide
IPIDNDTTSY

SEQ ID NO: 5102 - protein, 11 aa, Artificial Sequence
  Description of Artificial Sequence: Synthetic peptide
KQNPDIVIYQY

SEQ ID NO: 5103 - protein, 9 aa, Artificial Sequence
  Description of Artificial Sequence: Synthetic peptide
LQILGIVAL

SEQ ID NO: 5104 - protein, 8 aa, Artificial Sequence
  Description of Artificial Sequence: Synthetic peptide
TMGPGKVY

SEQ ID NO: 5105 - protein, 11 aa, Artificial Sequence
  Description of Artificial Sequence: Synthetic peptide
KQNPEIVIYQY

SEQ ID NO: 5106 - protein, 8 aa, Artificial Sequence
  Description of Artificial Sequence: Synthetic peptide
TMGPGRVY

SEQ ID NO: 5107 - protein, 9 aa, Artificial Sequence
  Description of Artificial Sequence: Synthetic peptide
DARLVITTY

SEQ ID NO: 5108 - protein, 9 aa, Artificial Sequence
  Description of Artificial Sequence: Synthetic peptide
HIVSPSCEY

SEQ ID NO: 5109 - protein, 9 aa, Artificial Sequence
  Description of Artificial Sequence: Synthetic peptide
TVLDVGDAY

SEQ ID NO: 5110 - protein, 10 aa, Artificial Sequence
  Description of Artificial Sequence: Synthetic peptide
IPIDNDTTSY

SEQ ID NO: 5111 - protein, 9 aa, Artificial Sequence
  Description of Artificial Sequence: Synthetic peptide
FLGAAGSTM

SEQ ID NO: 5112 - protein, 8 aa, Artificial Sequence
  Description of Artificial Sequence: Synthetic peptide
DQLIHVYY

SEQ ID NO: 5113 - protein, 9 aa, Artificial Sequence
  Description of Artificial Sequence: Synthetic peptide
TQACPKVSF

SEQ ID NO: 5114 - protein, 9 aa, Artificial Sequence
  Description of Artificial Sequence: Synthetic peptide
TMGPGKVYY

SEQ ID NO: 5115 - protein, 9 aa, Artificial Sequence
  Description of Artificial Sequence: Synthetic peptide
TVGGHQAAM

SEQ ID NO: 5116 - protein, 9 aa, Artificial Sequence
  Description of Artificial Sequence: Synthetic peptide
EAKLVITTY

SEQ ID NO: 5117 - protein, 8 aa, Artificial Sequence
  Description of Artificial Sequence: Synthetic peptide
EQLWVTVY

SEQ ID NO: 5118 - protein, 9 aa, Artificial Sequence
  Description of Artificial Sequence: Synthetic peptide
YSTQVDPEL

SEQ ID NO: 5119 - protein, 8 aa, Artificial Sequence
  Description of Artificial Sequence: Synthetic peptide
TMGPGRVY

SEQ ID NO: 5120 - protein, 10 aa, Artificial Sequence
  Description of Artificial Sequence: Synthetic peptide
EQFNNNTIVF

SEQ ID NO: 5121 - protein, 9 aa, Artificial Sequence
  Description of Artificial Sequence: Synthetic peptide
QMNNNNNSY

SEQ ID NO: 5122 - protein, 9 aa, Artificial Sequence
  Description of Artificial Sequence: Synthetic peptide
AAVDLSHFL

SEQ ID NO: 5123 - protein, 9 aa, Artificial Sequence
  Description of Artificial Sequence: Synthetic peptide
DAELVVTTY

SEQ ID NO: 5124 - protein, 9 aa, Artificial Sequence
  Description of Artificial Sequence: Synthetic peptide
TMGPGRVYY

SEQ ID NO: 5125 - protein, 10 aa, Artificial Sequence
  Description of Artificial Sequence: Synthetic peptide
VPINNDNTSY

SEQ ID NO: 5126 - protein, 8 aa, Artificial Sequence
  Description of Artificial Sequence: Synthetic peptide
DNYTSLIY

SEQ ID NO: 5127 - protein, 10 aa, Artificial Sequence
  Description of Artificial Sequence: Synthetic peptide
VQMNNNNNSY

SEQ ID NO: 5128 - protein, 8 aa, Artificial Sequence
  Description of Artificial Sequence: Synthetic peptide
TMGPGKVY

SEQ ID NO: 5129 - protein, 9 aa, Artificial Sequence
  Description of Artificial Sequence: Synthetic peptide
ALVEMGVEM

SEQ ID NO: 5130 - protein, 9 aa, Artificial Sequence
  Description of Artificial Sequence: Synthetic peptide
DNRQGTISF

SEQ ID NO: 5131 - protein, 9 aa, Artificial Sequence
  Description of Artificial Sequence: Synthetic peptide
FPQGEAREF

SEQ ID NO: 5132 - protein, 8 aa, Artificial Sequence
  Description of Artificial Sequence: Synthetic peptide
DQLIHLYY

SEQ ID NO: 5133 - protein, 9 aa, Artificial Sequence
  Description of Artificial Sequence: Synthetic peptide
IQRGPGRAF

SEQ ID NO: 5134 - protein, 9 aa, Artificial Sequence
  Description of Artificial Sequence: Synthetic peptide
SAEPVPLQL

SEQ ID NO: 5135 - protein, 9 aa, Artificial Sequence
  Description of Artificial Sequence: Synthetic peptide
DIAGTTSTL

SEQ ID NO: 5136 - protein, 9 aa, Artificial Sequence
  Description of Artificial Sequence: Synthetic peptide
ITKGLGISY

SEQ ID NO: 5137 - protein, 10 aa, Artificial Sequence
  Description of Artificial Sequence: Synthetic peptide
EVNIVTDSQY

SEQ ID NO: 5138 - protein, 8 aa, Artificial Sequence
  Description of Artificial Sequence: Synthetic peptide
AKLVITTY

SEQ ID NO: 5139 - protein, 9 aa, Artificial Sequence
  Description of Artificial Sequence: Synthetic peptide
TKKALGISY

SEQ ID NO: 5140 - protein, 8 aa, Artificial Sequence
  Description of Artificial Sequence: Synthetic peptide
TKALGISY

SEQ ID NO: 5141 - protein, 10 aa, Artificial Sequence
  Description of Artificial Sequence: Synthetic peptide
GKNNPVSQNY

SEQ ID NO: 5142 - protein, 8 aa, Artificial Sequence
  Description of Artificial Sequence: Synthetic peptide
TKGLGISY

SEQ ID NO: 5143 - protein, 10 aa, Artificial Sequence
  Description of Artificial Sequence: Synthetic peptide
VQMNNNNNSY

SEQ ID NO: 5144 - protein, 9 aa, Artificial Sequence
  Description of Artificial Sequence: Synthetic peptide
QKTELQAIY

SEQ ID NO: 5145 - protein, 9 aa, Artificial Sequence
  Description of Artificial Sequence: Synthetic peptide
ITKGLGISY

SEQ ID NO: 5146 - protein, 9 aa, Artificial Sequence
  Description of Artificial Sequence: Synthetic peptide
SKIGPENPY

SEQ ID NO: 5147 - protein, 8 aa, Artificial Sequence
  Description of Artificial Sequence: Synthetic peptide
KKALGISY

SEQ ID NO: 5148 - protein, 9 aa, Artificial Sequence
  Description of Artificial Sequence: Synthetic peptide
ITKALGISY

SEQ ID NO: 5149 - protein, 9 aa, Artificial Sequence
  Description of Artificial Sequence: Synthetic peptide
KQNPEIVIY

SEQ ID NO: 5150 - protein, 9 aa, Artificial Sequence
  Description of Artificial Sequence: Synthetic peptide
KQNPDIVIY

SEQ ID NO: 5151 - protein, 9 aa, Artificial Sequence
  Description of Artificial Sequence: Synthetic peptide
ADRQGTVSF

SEQ ID NO: 5152 - protein, 9 aa, Artificial Sequence
  Description of Artificial Sequence: Synthetic peptide
GKVQKEYAF

SEQ ID NO: 5153 - protein, 8 aa, Artificial Sequence
  Description of Artificial Sequence: Synthetic peptide
HKTIGTVL

SEQ ID NO: 5154 - protein, 8 aa, Artificial Sequence
  Description of Artificial Sequence: Synthetic peptide
HKAIGTVL

SEQ ID NO: 5155 - protein, 9 aa, Artificial Sequence
  Description of Artificial Sequence: Synthetic peptide
IQRGPGRAF

SEQ ID NO: 5156 - protein, 9 aa, Artificial Sequence
  Description of Artificial Sequence: Synthetic peptide
SQKQEPQEY

SEQ ID NO: 5157 - protein, 9 aa, Artificial Sequence
  Description of Artificial Sequence: Synthetic peptide
TMGPGKVYY

SEQ ID NO: 5158 - protein, 9 aa, Artificial Sequence
  Description of Artificial Sequence: Synthetic peptide
KQGQGQWTY

SEQ ID NO: 5159 - protein, 9 aa, Artificial Sequence
  Description of Artificial Sequence: Synthetic peptide
KNNPVSQNY

SEQ ID NO: 5160 - protein, 9 aa, Artificial Sequence
  Description of Artificial Sequence: Synthetic peptide
VKVIEEKAF

SEQ ID NO: 5161 - protein, 9 aa, Artificial Sequence
  Description of Artificial Sequence: Synthetic peptide
VKVVEEKAF

SEQ ID NO: 5162 - protein, 9 aa, Artificial Sequence
  Description of Artificial Sequence: Synthetic peptide
KQITKIQNF

SEQ ID NO: 5163 - protein, 9 aa, Artificial Sequence
  Description of Artificial Sequence: Synthetic peptide
TQACPKVSF

SEQ ID NO: 5164 - protein, 9 aa, Artificial Sequence
  Description of Artificial Sequence: Synthetic peptide
GHKAIGTVL

SEQ ID NO: 5165 - protein, 9 aa, Artificial Sequence
  Description of Artificial Sequence: Synthetic peptide
THLEGKVIL

SEQ ID NO: 5166 - protein, 9 aa, Artificial Sequence
  Description of Artificial Sequence: Synthetic peptide
HQAISPRTL

SEQ ID NO: 5167 - protein, 9 aa, Artificial Sequence
  Description of Artificial Sequence: Synthetic peptide
GHKTIGTVL

SEQ ID NO: 5168 - protein, 9 aa, Artificial Sequence
  Description of Artificial Sequence: Synthetic peptide
EHLKTAVQM

SEQ ID NO: 5169 - protein, 9 aa, Artificial Sequence
  Description of Artificial Sequence: Synthetic peptide
THLEGRVIL

SEQ ID NO: 5170 - protein, 8 aa, Artificial Sequence
  Description of Artificial Sequence: Synthetic peptide
FHHVAREL

SEQ ID NO: 5171 - protein, 9 aa, Artificial Sequence
  Description of Artificial Sequence: Synthetic peptide
IHIGPGRAF

SEQ ID NO: 5172 - protein, 9 aa, Artificial Sequence
  Description of Artificial Sequence: Synthetic peptide
THLEGKIIL

SEQ ID NO: 5173 - protein, 9 aa, Artificial Sequence
  Description of Artificial Sequence: Synthetic peptide
GHQAAMQML

SEQ ID NO: 5174 - protein, 9 aa, Artificial Sequence
  Description of Artificial Sequence: Synthetic peptide
IHSISERIL

SEQ ID NO: 5175 - protein, 9 aa, Artificial Sequence
  Description of Artificial Sequence: Synthetic peptide
SQVTSAPAI

SEQ ID NO: 5176 - protein, 9 aa, Artificial Sequence
  Description of Artificial Sequence: Synthetic peptide
AHTNDVKQL

SEQ ID NO: 5177 - protein, 10 aa, Artificial Sequence
  Description of Artificial Sequence: Synthetic peptide
VHIPLGEASL

SEQ ID NO: 5178 - protein, 9 aa, Artificial Sequence
  Description of Artificial Sequence: Synthetic peptide
IHTDNGPNF

SEQ ID NO: 5179 - protein, 8 aa, Artificial Sequence
  Description of Artificial Sequence: Synthetic peptide
THLEGRVI

SEQ ID NO: 5180 - protein, 10 aa, Artificial Sequence
  Description of Artificial Sequence: Synthetic peptide
HHAPWNIDDL

SEQ ID NO: 5181 - protein, 9 aa, Artificial Sequence
  Description of Artificial Sequence: Synthetic peptide
SQIYPGIKV

SEQ ID NO: 5182 - protein, 8 aa, Artificial Sequence
  Description of Artificial Sequence: Synthetic peptide
THLEGKVI

SEQ ID NO: 5183 - protein, 9 aa, Artificial Sequence
  Description of Artificial Sequence: Synthetic peptide
TVLDVGDAY

SEQ ID NO: 5184 - protein, 9 aa, Artificial Sequence
  Description of Artificial Sequence: Synthetic peptide
TINEEAAEW

SEQ ID NO: 5185 - protein, 9 aa, Artificial Sequence
  Description of Artificial Sequence: Synthetic peptide
YSTQVDPEL

SEQ ID NO: 5186 - protein, 8 aa, Artificial Sequence
  Description of Artificial Sequence: Synthetic peptide
AELVVTTY

SEQ ID NO: 5187 - protein, 9 aa, Artificial Sequence
  Description of Artificial Sequence: Synthetic peptide
TENLWVTVY

SEQ ID NO: 5188 - protein, 8 aa, Artificial Sequence
  Description of Artificial Sequence: Synthetic peptide
NETPGIRY

SEQ ID NO: 5189 - protein, 8 aa, Artificial Sequence
  Description of Artificial Sequence: Synthetic peptide
DEELIRTV

SEQ ID NO: 5190 - protein, 8 aa, Artificial Sequence
  Description of Artificial Sequence: Synthetic peptide
EEVVIRSV

SEQ ID NO: 5191 - protein, 10 aa, Artificial Sequence
  Description of Artificial Sequence: Synthetic peptide
SEAGATRISF

SEQ ID NO: 5192 - protein, 11 aa, Artificial Sequence
  Description of Artificial Sequence: Synthetic peptide
LEVNIVTDSQY

SEQ ID NO: 5193 - protein, 8 aa, Artificial Sequence
  Description of Artificial Sequence: Synthetic peptide
PEIVIYQY

SEQ ID NO: 5194 - protein, 8 aa, Artificial Sequence
  Description of Artificial Sequence: Synthetic peptide
IEIVQRTF

SEQ ID NO: 5195 - protein, 8 aa, Artificial Sequence
  Description of Artificial Sequence: Synthetic peptide
SERILGTY

SEQ ID NO: 5196 - protein, 8 aa, Artificial Sequence
  Description of Artificial Sequence: Synthetic peptide
IETIQRAF

SEQ ID NO: 5197 - protein, 8 aa, Artificial Sequence
  Description of Artificial Sequence: Synthetic peptide
DEELLRTV

SEQ ID NO: 5198 - protein, 8 aa, Artificial Sequence
  Description of Artificial Sequence: Synthetic peptide
LENVTENF

SEQ ID NO: 5199 - protein, 9 aa, Artificial Sequence
  Description of Artificial Sequence: Synthetic peptide
YETEVHNVW

SEQ ID NO: 5200 - protein, 8 aa, Artificial Sequence
  Description of Artificial Sequence: Synthetic peptide
TELQAIHL

SEQ ID NO: 5201 - protein, 8 aa, Artificial Sequence
  Description of Artificial Sequence: Synthetic peptide
NETEIFRP

SEQ ID NO: 5202 - protein, 8 aa, Artificial Sequence
  Description of Artificial Sequence: Synthetic peptide
TEIVPLTA

SEQ ID NO: 5203 - protein, 8 aa, Artificial Sequence
  Description of Artificial Sequence: Synthetic peptide
IEVLQRVY

SEQ ID NO: 5204 - protein, 9 aa, Artificial Sequence
  Description of Artificial Sequence: Synthetic peptide
ARVLAVERY

SEQ ID NO: 5205 - protein, 10 aa, Artificial Sequence
  Description of Artificial Sequence: Synthetic peptide
GNSSQVSQNY

SEQ ID NO: 5206 - protein, 10 aa, Artificial Sequence
  Description of Artificial Sequence: Synthetic peptide
VRQGYSPLSF

SEQ ID NO: 5207 - protein, 9 aa, Artificial Sequence
  Description of Artificial Sequence: Synthetic peptide
ARILAVERY

SEQ ID NO: 5208 - protein, 9 aa, Artificial Sequence
  Description of Artificial Sequence: Synthetic peptide
ARVLAIERY

SEQ ID NO: 5209 - protein, 11 aa, Artificial Sequence
  Description of Artificial Sequence: Synthetic peptide
LIYTLIEDSQK

SEQ ID NO: 5210 - protein, 9 aa, Artificial Sequence
  Description of Artificial Sequence: Synthetic peptide
YETEVHNVW

SEQ ID NO: 5211 - protein, 10 aa, Artificial Sequence
  Description of Artificial Sequence: Synthetic peptide
DRSGPLVDGF

SEQ ID NO: 5212 - protein, 11 aa, Artificial Sequence
  Description of Artificial Sequence: Synthetic peptide
YLALAALITPK

SEQ ID NO: 5213 - protein, 11 aa, Artificial Sequence
  Description of Artificial Sequence: Synthetic peptide
KEAELELAENR

SEQ ID NO: 5214 - protein, 9 aa, Artificial Sequence
  Description of Artificial Sequence: Synthetic peptide
ALAALITPK

SEQ ID NO: 5215 - protein, 9 aa, Artificial Sequence
  Description of Artificial Sequence: Synthetic peptide
SRIGITLQR

SEQ ID NO: 5216 - protein, 11 aa, Artificial Sequence
  Description of Artificial Sequence: Synthetic peptide
LIGESQIQQEK

SEQ ID NO: 5217 - protein, 11 aa, Artificial Sequence
  Description of Artificial Sequence: Synthetic peptide
TAIAVAEGTDR

SEQ ID NO: 5218 - protein, 11 aa, Artificial Sequence
  Description of Artificial Sequence: Synthetic peptide
YLALAVLITPK

SEQ ID NO: 5219 - protein, 10 aa, Artificial Sequence
  Description of Artificial Sequence: Synthetic peptide
GALDLSHFLK

SEQ ID NO: 5220 - protein, 9 aa, Artificial Sequence
  Description of Artificial Sequence: Synthetic peptide
ALAVLITPK

SEQ ID NO: 5221 - protein, 11 aa, Artificial Sequence
  Description of Artificial Sequence: Synthetic peptide
YATGEIIGDIR

SEQ ID NO: 5222 - protein, 9 aa, Artificial Sequence
  Description of Artificial Sequence: Synthetic peptide
TRIVELLGR

SEQ ID NO: 5223 - protein, 9 aa, Artificial Sequence
  Description of Artificial Sequence: Synthetic peptide
SRIGITLQR

SEQ ID NO: 5224 - protein, 9 aa, Artificial Sequence
  Description of Artificial Sequence: Synthetic peptide
SRIGIIRQR

SEQ ID NO: 5225 - protein, 9 aa, Artificial Sequence
  Description of Artificial Sequence: Synthetic peptide
SRIGVTRQR

SEQ ID NO: 5226 - protein, 9 aa, Artificial Sequence
  Description of Artificial Sequence: Synthetic peptide
GRAFVTIGK

SEQ ID NO: 5227 - protein, 9 aa, Artificial Sequence
  Description of Artificial Sequence: Synthetic peptide
GRVILVAVH

SEQ ID NO: 5228 - protein, 9 aa, Artificial Sequence
  Description of Artificial Sequence: Synthetic peptide
ARVLAVERY

SEQ ID NO: 5229 - protein, 9 aa, Artificial Sequence
  Description of Artificial Sequence: Synthetic peptide
ARIEVKDTK

SEQ ID NO: 5230 - protein, 9 aa, Artificial Sequence
  Description of Artificial Sequence: Synthetic peptide
ARILAVERY

SEQ ID NO: 5231 - protein, 9 aa, Artificial Sequence
  Description of Artificial Sequence: Synthetic peptide
QRIEIKDTK

SEQ ID NO: 5232 - protein, 9 aa, Artificial Sequence
  Description of Artificial Sequence: Synthetic peptide
ARVLAIERY

SEQ ID NO: 5233 - protein, 9 aa, Artificial Sequence
  Description of Artificial Sequence: Synthetic peptide
CRIKQIVNM

SEQ ID NO: 5234 - protein, 9 aa, Artificial Sequence
  Description of Artificial Sequence: Synthetic peptide
QRIEVRDTK

SEQ ID NO: 5235 - protein, 9 aa, Artificial Sequence
  Description of Artificial Sequence: Synthetic peptide
CRIKQIINR

SEQ ID NO: 5236 - protein, 9 aa, Artificial Sequence
  Description of Artificial Sequence: Synthetic peptide
GRQKVIPIK

SEQ ID NO: 5237 - protein, 9 aa, Artificial Sequence
  Description of Artificial Sequence: Synthetic peptide
TRKGLGISY

SEQ ID NO: 5238 - protein, 9 aa, Artificial Sequence
  Description of Artificial Sequence: Synthetic peptide
TRIEELRQH

SEQ ID NO: 5239 - protein, 10 aa, Artificial Sequence
  Description of Artificial Sequence: Synthetic peptide
IPIDNDTTSY

SEQ ID NO: 5240 - protein, 10 aa, Artificial Sequence
  Description of Artificial Sequence: Synthetic peptide
VPINNDNTSY

SEQ ID NO: 5241 - protein, 11 aa, Artificial Sequence
  Description of Artificial Sequence: Synthetic peptide
IPAETGQETAY

SEQ ID NO: 5242 - protein, 10 aa, Artificial Sequence
  Description of Artificial Sequence: Synthetic peptide
VPIDNDSYSY

SEQ ID NO: 5243 - protein, 9 aa, Artificial Sequence
  Description of Artificial Sequence: Synthetic peptide
NPDIVIYQY

SEQ ID NO: 5244 - protein, 9 aa, Artificial Sequence
  Description of Artificial Sequence: Synthetic peptide
EPIVGAETF

SEQ ID NO: 5245 - protein, 9 aa, Artificial Sequence
  Description of Artificial Sequence: Synthetic peptide
FPQGEAREF

SEQ ID NO: 5246 - protein, 9 aa, Artificial Sequence
  Description of Artificial Sequence: Synthetic peptide
EASLVIKTY

SEQ ID NO: 5247 - protein, 9 aa, Artificial Sequence
  Description of Artificial Sequence: Synthetic peptide
NPEIVIYQY

SEQ ID NO: 5248 - protein, 9 aa, Artificial Sequence
  Description of Artificial Sequence: Synthetic peptide
DAELVVTTY

SEQ ID NO: 5249 - protein, 9 aa, Artificial Sequence
  Description of Artificial Sequence: Synthetic peptide
TVLDVGDAY

SEQ ID NO: 5250 - protein, 8 aa, Artificial Sequence
  Description of Artificial Sequence: Synthetic peptide
TPGPGIRY

SEQ ID NO: 5251 - protein, 9 aa, Artificial Sequence
  Description of Artificial Sequence: Synthetic peptide
DPEIVTHSF

SEQ ID NO: 5252 - protein, 8 aa, Artificial Sequence
  Description of Artificial Sequence: Synthetic peptide
TPGPGVRY

SEQ ID NO: 5253 - protein, 10 aa, Artificial Sequence
  Description of Artificial Sequence: Synthetic peptide
VPLDEDFRKY

SEQ ID NO: 5254 - protein, 9 aa, Artificial Sequence
  Description of Artificial Sequence: Synthetic peptide
DARLVITTY

SEQ ID NO: 5255 - protein, 9 aa, Artificial Sequence
  Description of Artificial Sequence: Synthetic peptide
DPEIVMHTF

SEQ ID NO: 5256 - protein, 9 aa, Artificial Sequence
  Description of Artificial Sequence: Synthetic peptide
HIVSPSCEY

SEQ ID NO: 5257 - protein, 9 aa, Artificial Sequence
  Description of Artificial Sequence: Synthetic peptide
EAGATRISF

SEQ ID NO: 5258 - protein, 9 aa, Artificial Sequence
  Description of Artificial Sequence: Synthetic peptide
EAKLVITTY

SEQ ID NO: 5259 - protein, 9 aa, Artificial Sequence
  Description of Artificial Sequence: Synthetic peptide
PPIPVGEIY

SEQ ID NO: 5260 - protein, 8 aa, Artificial Sequence
  Description of Artificial Sequence: Synthetic peptide
TPGPGTRY

SEQ ID NO: 5261 - protein, 10 aa, Artificial Sequence
  Description of Artificial Sequence: Synthetic peptide
NPPIPVGEIY

SEQ ID NO: 5262 - protein, 8 aa, Artificial Sequence
  Description of Artificial Sequence: Synthetic peptide
VPIDNDSY

SEQ ID NO: 5263 - protein, 9 aa, Artificial Sequence
  Description of Artificial Sequence: Synthetic peptide
IPIVAIVAL

SEQ ID NO: 5264 - protein, 9 aa, Artificial Sequence
  Description of Artificial Sequence: Synthetic peptide
SPAIFQSSM

SEQ ID NO: 5265 - protein, 9 aa, Artificial Sequence
  Description of Artificial Sequence: Synthetic peptide
DPEIVMHSF

SEQ ID NO: 5266 - protein, 9 aa, Artificial Sequence
  Description of Artificial Sequence: Synthetic peptide
IPLTEEAEL

SEQ ID NO: 5267 - protein, 9 aa, Artificial Sequence
  Description of Artificial Sequence: Synthetic peptide
LADQLIHVY

SEQ ID NO: 5268 - protein, 9 aa, Artificial Sequence
  Description of Artificial Sequence: Synthetic peptide
DPNPQEVVL

SEQ ID NO: 5269 - protein, 9 aa, Artificial Sequence
  Description of Artificial Sequence: Synthetic peptide
SAEPVPLQL

SEQ ID NO: 5270 - protein, 10 aa, Artificial Sequence
  Description of Artificial Sequence: Synthetic peptide
DIVPIDNDSY

SEQ ID NO: 5271 - protein, 9 aa, Artificial Sequence
  Description of Artificial Sequence: Synthetic peptide
FPISPIETV

SEQ ID NO: 5272 - protein, 9 aa, Artificial Sequence
  Description of Artificial Sequence: Synthetic peptide
IPLTEEAEL

SEQ ID NO: 5273 - protein, 9 aa, Artificial Sequence
  Description of Artificial Sequence: Synthetic peptide
YSTQVDPEL

SEQ ID NO: 5274 - protein, 9 aa, Artificial Sequence
  Description of Artificial Sequence: Synthetic peptide
DPNPQEVVL

SEQ ID NO: 5275 - protein, 9 aa, Artificial Sequence
  Description of Artificial Sequence: Synthetic peptide
QPDQSESEL

SEQ ID NO: 5276 - protein, 9 aa, Artificial Sequence
  Description of Artificial Sequence: Synthetic peptide
QPDKSESEL

SEQ ID NO: 5277 - protein, 9 aa, Artificial Sequence
  Description of Artificial Sequence: Synthetic peptide
YTTQVDPDL

SEQ ID NO: 5278 - protein, 9 aa, Artificial Sequence
  Description of Artificial Sequence: Synthetic peptide
DPNPQELVL

SEQ ID NO: 5279 - protein, 9 aa, Artificial Sequence
  Description of Artificial Sequence: Synthetic peptide
VPLTKEAEL

SEQ ID NO: 5280 - protein, 9 aa, Artificial Sequence
  Description of Artificial Sequence: Synthetic peptide
YSTQVDPDL

SEQ ID NO: 5281 - protein, 9 aa, Artificial Sequence
  Description of Artificial Sequence: Synthetic peptide
SAEPVPLQL

SEQ ID NO: 5282 - protein, 9 aa, Artificial Sequence
  Description of Artificial Sequence: Synthetic peptide
FPQGEAREF

SEQ ID NO: 5283 - protein, 8 aa, Artificial Sequence
  Description of Artificial Sequence: Synthetic peptide
YVGSDLEM

SEQ ID NO: 5284 - protein, 9 aa, Artificial Sequence
  Description of Artificial Sequence: Synthetic peptide
VPLTAEAEL

SEQ ID NO: 5285 - protein, 8 aa, Artificial Sequence
  Description of Artificial Sequence: Synthetic peptide
IPLEDAEL

SEQ ID NO: 5286 - protein, 9 aa, Artificial Sequence
  Description of Artificial Sequence: Synthetic peptide
IDDPEKEVL

SEQ ID NO: 5287 - protein, 11 aa, Artificial Sequence
  Description of Artificial Sequence: Synthetic peptide
IPLTEEAELEL

SEQ ID NO: 5288 - protein, 8 aa, Artificial Sequence
  Description of Artificial Sequence: Synthetic peptide
LAEEDVVI

SEQ ID NO: 5289 - protein, 9 aa, Artificial Sequence
  Description of Artificial Sequence: Synthetic peptide
HPAQAGPIA

SEQ ID NO: 5290 - protein, 8 aa, Artificial Sequence
  Description of Artificial Sequence: Synthetic peptide
DPEKEVLM

SEQ ID NO: 5291 - protein, 9 aa, Artificial Sequence
  Description of Artificial Sequence: Synthetic peptide
FPISPIETV

SEQ ID NO: 5292 - protein, 9 aa, Artificial Sequence
  Description of Artificial Sequence: Synthetic peptide
IPLTEEAEL

SEQ ID NO: 5293 - protein, 9 aa, Artificial Sequence
  Description of Artificial Sequence: Synthetic peptide
YSTQVDPEL

SEQ ID NO: 5294 - protein, 9 aa, Artificial Sequence
  Description of Artificial Sequence: Synthetic peptide
DPNPQEVVL

SEQ ID NO: 5295 - protein, 9 aa, Artificial Sequence
  Description of Artificial Sequence: Synthetic peptide
IPIVAIVAL

SEQ ID NO: 5296 - protein, 9 aa, Artificial Sequence
  Description of Artificial Sequence: Synthetic peptide
DPNPQELVL

SEQ ID NO: 5297 - protein, 9 aa, Artificial Sequence
  Description of Artificial Sequence: Synthetic peptide
VPLTKEAEL

SEQ ID NO: 5298 - protein, 11 aa, Artificial Sequence
  Description of Artificial Sequence: Synthetic peptide
IPLTEEAELEL

SEQ ID NO: 5299 - protein, 9 aa, Artificial Sequence
  Description of Artificial Sequence: Synthetic peptide
YTTQVDPDL

SEQ ID NO: 5300 - protein, 9 aa, Artificial Sequence
  Description of Artificial Sequence: Synthetic peptide
VPLTAEAEL

SEQ ID NO: 5301 - protein, 9 aa, Artificial Sequence
  Description of Artificial Sequence: Synthetic peptide
FPISPIETV

SEQ ID NO: 5302 - protein, 9 aa, Artificial Sequence
  Description of Artificial Sequence: Synthetic peptide
FPQGEAREF

SEQ ID NO: 5303 - protein, 9 aa, Artificial Sequence
  Description of Artificial Sequence: Synthetic peptide
SAEPVPLQL

SEQ ID NO: 5304 - protein, 9 aa, Artificial Sequence
  Description of Artificial Sequence: Synthetic peptide
HPAQAGPIA

SEQ ID NO: 5305 - protein, 9 aa, Artificial Sequence
  Description of Artificial Sequence: Synthetic peptide
YSTQVDPDL

SEQ ID NO: 5306 - protein, 10 aa, Artificial Sequence
  Description of Artificial Sequence: Synthetic peptide
EPNDGKNITL

SEQ ID NO: 5307 - protein, 9 aa, Artificial Sequence
  Description of Artificial Sequence: Synthetic peptide
FPVTPQVPL

SEQ ID NO: 5308 - protein, 9 aa, Artificial Sequence
  Description of Artificial Sequence: Synthetic peptide
TPQDLNTML

SEQ ID NO: 5309 - protein, 9 aa, Artificial Sequence
  Description of Artificial Sequence: Synthetic peptide
LPLPPIERL

SEQ ID NO: 5310 - protein, 8 aa, Artificial Sequence
  Description of Artificial Sequence: Synthetic peptide
YVGSDLEM

SEQ ID NO: 5311 - protein, 9 aa, Artificial Sequence
  Description of Artificial Sequence: Synthetic peptide
IVTDSQYAL

SEQ ID NO: 5312 - protein, 10 aa, Artificial Sequence
  Description of Artificial Sequence: Synthetic peptide
SPIETVPVKL

SEQ ID NO: 5313 - protein, 10 aa, Artificial Sequence
  Description of Artificial Sequence: Synthetic peptide
IPIDNDTTSY

SEQ ID NO: 5314 - protein, 9 aa, Artificial Sequence
  Description of Artificial Sequence: Synthetic peptide
EPIVGAETF

SEQ ID NO: 5315 - protein, 9 aa, Artificial Sequence
  Description of Artificial Sequence: Synthetic peptide
FPVKPQVPL

SEQ ID NO: 5316 - protein, 9 aa, Artificial Sequence
  Description of Artificial Sequence: Synthetic peptide
YPLTALKSL

SEQ ID NO: 5317 - protein, 8 aa, Artificial Sequence
  Description of Artificial Sequence: Synthetic peptide
IPLEDAEL

SEQ ID NO: 5318 - protein, 9 aa, Artificial Sequence
  Description of Artificial Sequence: Synthetic peptide
QPDQSESEL

SEQ ID NO: 5319 - protein, 10 aa, Artificial Sequence
  Description of Artificial Sequence: Synthetic peptide
VPTDPNPQEL

SEQ ID NO: 5320 - protein, 10 aa, Artificial Sequence
  Description of Artificial Sequence: Synthetic peptide
NANPDCKTIL

SEQ ID NO: 5321 - protein, 9 aa, Artificial Sequence
  Description of Artificial Sequence: Synthetic peptide
HPVHAGPIA

SEQ ID NO: 5322 - protein, 9 aa, Artificial Sequence
  Description of Artificial Sequence: Synthetic peptide
SPLSFQTRL

SEQ ID NO: 5323 - protein, 9 aa, Artificial Sequence
  Description of Artificial Sequence: Synthetic peptide
SPLSFQTHL

SEQ ID NO: 5324 - protein, 11 aa, Artificial Sequence
  Description of Artificial Sequence: Synthetic peptide
VPLTAEAELEL

SEQ ID NO: 5325 - protein, 9 aa, Artificial Sequence
  Description of Artificial Sequence: Synthetic peptide
YPLASLKSL

SEQ ID NO: 5326 - protein, 9 aa, Artificial Sequence
  Description of Artificial Sequence: Synthetic peptide
YPLTSLRSL

SEQ ID NO: 5327 - protein, 9 aa, Artificial Sequence
  Description of Artificial Sequence: Synthetic peptide
YNTQVDPGL

SEQ ID NO: 5328 - protein, 9 aa, Artificial Sequence
  Description of Artificial Sequence: Synthetic peptide
QPDKSESEL

SEQ ID NO: 5329 - protein, 9 aa, Artificial Sequence
  Description of Artificial Sequence: Synthetic peptide
SAVSLFNAI

SEQ ID NO: 5330 - protein, 10 aa, Artificial Sequence
  Description of Artificial Sequence: Synthetic peptide
IPIDNDTTSY

SEQ ID NO: 5331 - protein, 11 aa, Artificial Sequence
  Description of Artificial Sequence: Synthetic peptide
IPAETGQETAY

SEQ ID NO: 5332 - protein, 10 aa, Artificial Sequence
  Description of Artificial Sequence: Synthetic peptide
VPINNDNTSY

SEQ ID NO: 5333 - protein, 9 aa, Artificial Sequence
  Description of Artificial Sequence: Synthetic peptide
NPDIVIYQY

SEQ ID NO: 5334 - protein, 9 aa, Artificial Sequence
  Description of Artificial Sequence: Synthetic peptide
FPQGEAREF

SEQ ID NO: 5335 - protein, 10 aa, Artificial Sequence
  Description of Artificial Sequence: Synthetic peptide
VPIDNDSYSY

SEQ ID NO: 5336 - protein, 9 aa, Artificial Sequence
  Description of Artificial Sequence: Synthetic peptide
EPIVGAETF

SEQ ID NO: 5337 - protein, 9 aa, Artificial Sequence
  Description of Artificial Sequence: Synthetic peptide
IPLTEEAEL

SEQ ID NO: 5338 - protein, 9 aa, Artificial Sequence
  Description of Artificial Sequence: Synthetic peptide
DAELVVTTY

SEQ ID NO: 5339 - protein, 9 aa, Artificial Sequence
  Description of Artificial Sequence: Synthetic peptide
DPEIVTHSF

SEQ ID NO: 5340 - protein, 9 aa, Artificial Sequence
  Description of Artificial Sequence: Synthetic peptide
NPEIVIYQY

SEQ ID NO: 5341 - protein, 9 aa, Artificial Sequence
  Description of Artificial Sequence: Synthetic peptide
LADQLIHVY

SEQ ID NO: 5342 - protein, 10 aa, Artificial Sequence
  Description of Artificial Sequence: Synthetic peptide
VPLDEDFRKY

SEQ ID NO: 5343 - protein, 9 aa, Artificial Sequence
  Description of Artificial Sequence: Synthetic peptide
IVPIDNDSY

SEQ ID NO: 5344 - protein, 8 aa, Artificial Sequence
  Description of Artificial Sequence: Synthetic peptide
YVGSDLEM

SEQ ID NO: 5345 - protein, 8 aa, Artificial Sequence
  Description of Artificial Sequence: Synthetic peptide
TPGPGVRY

SEQ ID NO: 5346 - protein, 9 aa, Artificial Sequence
  Description of Artificial Sequence: Synthetic peptide
TVLDVGDAY

SEQ ID NO: 5347 - protein, 9 aa, Artificial Sequence
  Description of Artificial Sequence: Synthetic peptide
DPNPQEVVL

SEQ ID NO: 5348 - protein, 11 aa, Artificial Sequence
  Description of Artificial Sequence: Synthetic peptide
IPLTEEAELEL

SEQ ID NO: 5349 - protein, 10 aa, Artificial Sequence
  Description of Artificial Sequence: Synthetic peptide
NPPIPVGEIY

SEQ ID NO: 5350 - protein, 9 aa, Artificial Sequence
  Description of Artificial Sequence: Synthetic peptide
QPDQSESEL

SEQ ID NO: 5351 - protein, 8 aa, Artificial Sequence
  Description of Artificial Sequence: Synthetic peptide
TPGPGIRY

SEQ ID NO: 5352 - protein, 9 aa, Artificial Sequence
  Description of Artificial Sequence: Synthetic peptide
IPLTEEAEL

SEQ ID NO: 5353 - protein, 9 aa, Artificial Sequence
  Description of Artificial Sequence: Synthetic peptide
DPNPQEVVL

SEQ ID NO: 5354 - protein, 9 aa, Artificial Sequence
  Description of Artificial Sequence: Synthetic peptide
YSTQVDPEL

SEQ ID NO: 5355 - protein, 9 aa, Artificial Sequence
  Description of Artificial Sequence: Synthetic peptide
VPLTKEAEL

SEQ ID NO: 5356 - protein, 9 aa, Artificial Sequence
  Description of Artificial Sequence: Synthetic peptide
QPDQSESEL

SEQ ID NO: 5357 - protein, 9 aa, Artificial Sequence
  Description of Artificial Sequence: Synthetic peptide
DPNPQELVL

SEQ ID NO: 5358 - protein, 9 aa, Artificial Sequence
  Description of Artificial Sequence: Synthetic peptide
QPDKSESEL

SEQ ID NO: 5359 - protein, 9 aa, Artificial Sequence
  Description of Artificial Sequence: Synthetic peptide
FPQGEAREF

SEQ ID NO: 5360 - protein, 9 aa, Artificial Sequence
  Description of Artificial Sequence: Synthetic peptide
YTTQVDPDL

SEQ ID NO: 5361 - protein, 9 aa, Artificial Sequence
  Description of Artificial Sequence: Synthetic peptide
VPLTAEAEL

SEQ ID NO: 5362 - protein, 11 aa, Artificial Sequence
  Description of Artificial Sequence: Synthetic peptide
IPLTEEAELEL

SEQ ID NO: 5363 - protein, 8 aa, Artificial Sequence
  Description of Artificial Sequence: Synthetic peptide
DPEKEVLM

SEQ ID NO: 5364 - protein, 9 aa, Artificial Sequence
  Description of Artificial Sequence: Synthetic peptide
SAEPVPLQL

SEQ ID NO: 5365 - protein, 8 aa, Artificial Sequence
  Description of Artificial Sequence: Synthetic peptide
YVGSDLEM

SEQ ID NO: 5366 - protein, 8 aa, Artificial Sequence
  Description of Artificial Sequence: Synthetic peptide
IPLEDAEL

SEQ ID NO: 5367 - protein, 9 aa, Artificial Sequence
  Description of Artificial Sequence: Synthetic peptide
DPEIVTHSF

SEQ ID NO: 5368 - protein, 9 aa, Artificial Sequence
  Description of Artificial Sequence: Synthetic peptide
YSTQVDPDL

SEQ ID NO: 5369 - protein, 9 aa, Artificial Sequence
  Description of Artificial Sequence: Synthetic peptide
IDDPEKEVL

SEQ ID NO: 5370 - protein, 9 aa, Artificial Sequence
  Description of Artificial Sequence: Synthetic peptide
LPLPPIERL

SEQ ID NO: 5371 - protein, 8 aa, Artificial Sequence
  Description of Artificial Sequence: Synthetic peptide
DPDLADQL

SEQ ID NO: 5372 - protein, 9 aa, Artificial Sequence
  Description of Artificial Sequence: Synthetic peptide
FPISPIETV

SEQ ID NO: 5373 - protein, 9 aa, Artificial Sequence
  Description of Artificial Sequence: Synthetic peptide
HPAQAGPIA

SEQ ID NO: 5374 - protein, 9 aa, Artificial Sequence
  Description of Artificial Sequence: Synthetic peptide
HIPLEDAEL

SEQ ID NO: 5375 - protein, 9 aa, Artificial Sequence
  Description of Artificial Sequence: Synthetic peptide
MDDPEREVL

SEQ ID NO: 5376 - protein, 9 aa, Artificial Sequence
  Description of Artificial Sequence: Synthetic peptide
MEDPEKEVL

SEQ ID NO: 5377 - protein, 9 aa, Artificial Sequence
  Description of Artificial Sequence: Synthetic peptide
IPIVAIVAL

SEQ ID NO: 5378 - protein, 9 aa, Artificial Sequence
  Description of Artificial Sequence: Synthetic peptide
EPIVGAETF

SEQ ID NO: 5379 - protein, 9 aa, Artificial Sequence
  Description of Artificial Sequence: Synthetic peptide
RDLERHGAL

SEQ ID NO: 5380 - protein, 9 aa, Artificial Sequence
  Description of Artificial Sequence: Synthetic peptide
ADRQGTVSF

SEQ ID NO: 5381 - protein, 9 aa, Artificial Sequence
  Description of Artificial Sequence: Synthetic peptide
AEWDRVHPV

SEQ ID NO: 5382 - protein, 9 aa, Artificial Sequence
  Description of Artificial Sequence: Synthetic peptide
ADSPTSREL

SEQ ID NO: 5383 - protein, 9 aa, Artificial Sequence
  Description of Artificial Sequence: Synthetic peptide
ADTGHSNQV

SEQ ID NO: 5384 - protein, 9 aa, Artificial Sequence
  Description of Artificial Sequence: Synthetic peptide
SDSAIRNAL

SEQ ID NO: 5385 - protein, 10 aa, Artificial Sequence
  Description of Artificial Sequence: Synthetic peptide
SEAGATRISF

SEQ ID NO: 5386 - protein, 8 aa, Artificial Sequence
  Description of Artificial Sequence: Synthetic peptide
SEELKSLF

SEQ ID NO: 5387 - protein, 8 aa, Artificial Sequence
  Description of Artificial Sequence: Synthetic peptide
YDTEVHNV

SEQ ID NO: 5388 - protein, 8 aa, Artificial Sequence
  Description of Artificial Sequence: Synthetic peptide
QDSQTHQV

SEQ ID NO: 5389 - protein, 8 aa, Artificial Sequence
  Description of Artificial Sequence: Synthetic peptide
AEHLKTAV

SEQ ID NO: 5390 - protein, 10 aa, Artificial Sequence
  Description of Artificial Sequence: Synthetic peptide
SDSAIRNALL

SEQ ID NO: 5391 - protein, 8 aa, Artificial Sequence
  Description of Artificial Sequence: Synthetic peptide
NDTTSYKL

SEQ ID NO: 5392 - protein, 8 aa, Artificial Sequence
  Description of Artificial Sequence: Synthetic peptide
KEATTTLF

SEQ ID NO: 5393 - protein, 8 aa, Artificial Sequence
  Description of Artificial Sequence: Synthetic peptide
YETEVHNV

SEQ ID NO: 5394 - protein, 8 aa, Artificial Sequence
  Description of Artificial Sequence: Synthetic peptide
LENVTENF

SEQ ID NO: 5395 - protein, 8 aa, Artificial Sequence
  Description of Artificial Sequence: Synthetic peptide
IETIQRAF

SEQ ID NO: 5396 - protein, 9 aa, Artificial Sequence
  Description of Artificial Sequence: Synthetic peptide
IHTDNGPNF

SEQ ID NO: 5397 - protein, 9 aa, Artificial Sequence
  Description of Artificial Sequence: Synthetic peptide
IHTDNGSNF

SEQ ID NO: 5398 - protein, 9 aa, Artificial Sequence
  Description of Artificial Sequence: Synthetic peptide
TQGVGDPQI

SEQ ID NO: 5399 - protein, 11 aa, Artificial Sequence
  Description of Artificial Sequence: Synthetic peptide
TQVDPGLADQL

SEQ ID NO: 5400 - protein, 10 aa, Artificial Sequence
  Description of Artificial Sequence: Synthetic peptide
HHAPWDVDDL

SEQ ID NO: 5401 - protein, 9 aa, Artificial Sequence
  Description of Artificial Sequence: Synthetic peptide
THLEGKVIL

SEQ ID NO: 5402 - protein, 11 aa, Artificial Sequence
  Description of Artificial Sequence: Synthetic peptide
TQVDPELADQL

SEQ ID NO: 5403 - protein, 10 aa, Artificial Sequence
  Description of Artificial Sequence: Synthetic peptide
HHAPWNIDDL

SEQ ID NO: 5404 - protein, 11 aa, Artificial Sequence
  Description of Artificial Sequence: Synthetic peptide
TQVDPDLADQL

SEQ ID NO: 5405 - protein, 9 aa, Artificial Sequence
  Description of Artificial Sequence: Synthetic peptide
TQDFWEVQL

SEQ ID NO: 5406 - protein, 10 aa, Artificial Sequence
  Description of Artificial Sequence: Synthetic peptide
IHTDNGPNFI

SEQ ID NO: 5407 - protein, 10 aa, Artificial Sequence
  Description of Artificial Sequence: Synthetic peptide
VHIPLGEASL

SEQ ID NO: 5408 - protein, 9 aa, Artificial Sequence
  Description of Artificial Sequence: Synthetic peptide
RRAPPDSQI

SEQ ID NO: 5409 - protein, 9 aa, Artificial Sequence
  Description of Artificial Sequence: Synthetic peptide
GHQAAMQML

SEQ ID NO: 5410 - protein, 9 aa, Artificial Sequence
  Description of Artificial Sequence: Synthetic peptide
THLEGKIIL

SEQ ID NO: 5411 - protein, 9 aa, Artificial Sequence
  Description of Artificial Sequence: Synthetic peptide
AHTNDVKQL

SEQ ID NO: 5412 - protein, 9 aa, Artificial Sequence
  Description of Artificial Sequence: Synthetic peptide
EHLKTAVQM

SEQ ID NO: 5413 - protein, 9 aa, Artificial Sequence
  Description of Artificial Sequence: Synthetic peptide
TQGVGSPQI

SEQ ID NO: 5414 - protein, 9 aa, Artificial Sequence
  Description of Artificial Sequence: Synthetic peptide
QDSGLEVNI

SEQ ID NO: 5415 - protein, 9 aa, Artificial Sequence
  Description of Artificial Sequence: Synthetic peptide
ERYLQDQQL

SEQ ID NO: 5416 - protein, 10 aa, Artificial Sequence
  Description of Artificial Sequence: Synthetic peptide
VHIPLEDAEL

SEQ ID NO: 5417 - protein, 10 aa, Artificial Sequence
  Description of Artificial Sequence: Synthetic peptide
VHIPLGEAKL

SEQ ID NO: 5418 - protein, 9 aa, Artificial Sequence
  Description of Artificial Sequence: Synthetic peptide
THLEGRVIL

SEQ ID NO: 5419 - protein, 9 aa, Artificial Sequence
  Description of Artificial Sequence: Synthetic peptide
ERYLQDQQL

SEQ ID NO: 5420 - protein, 9 aa, Artificial Sequence
  Description of Artificial Sequence: Synthetic peptide
GRSTEPVSL

SEQ ID NO: 5421 - protein, 11 aa, Artificial Sequence
  Description of Artificial Sequence: Synthetic peptide
TQVDPGLADQL

SEQ ID NO: 5422 - protein, 9 aa, Artificial Sequence
  Description of Artificial Sequence: Synthetic peptide
THLEGKVIL

SEQ ID NO: 5423 - protein, 9 aa, Artificial Sequence
  Description of Artificial Sequence: Synthetic peptide
EHLKTAVQM

SEQ ID NO: 5424 - protein, 9 aa, Artificial Sequence
  Description of Artificial Sequence: Synthetic peptide
DRQTHQASL

SEQ ID NO: 5425 - protein, 9 aa, Artificial Sequence
  Description of Artificial Sequence: Synthetic peptide
ERYLEDQQL

SEQ ID NO: 5426 - protein, 11 aa, Artificial Sequence
  Description of Artificial Sequence: Synthetic peptide
TQVDPDLADQL

SEQ ID NO: 5427 - protein, 11 aa, Artificial Sequence
  Description of Artificial Sequence: Synthetic peptide
TQVDPELADQL

SEQ ID NO: 5428 - protein, 9 aa, Artificial Sequence
  Description of Artificial Sequence: Synthetic peptide
SQVTSAPAI

SEQ ID NO: 5429 - protein, 9 aa, Artificial Sequence
  Description of Artificial Sequence: Synthetic peptide
IHTDNGPNF

SEQ ID NO: 5430 - protein, 9 aa, Artificial Sequence
  Description of Artificial Sequence: Synthetic peptide
IHTDNGSNF

SEQ ID NO: 5431 - protein, 9 aa, Artificial Sequence
  Description of Artificial Sequence: Synthetic peptide
HQAISPRTL

SEQ ID NO: 5432 - protein, 9 aa, Artificial Sequence
  Description of Artificial Sequence: Synthetic peptide
EQVDKLVSA

SEQ ID NO: 5433 - protein, 10 aa, Artificial Sequence
  Description of Artificial Sequence: Synthetic peptide
SQYALGIIQA

SEQ ID NO: 5434 - protein, 8 aa, Artificial Sequence
  Description of Artificial Sequence: Synthetic peptide
GHIVSPSC

SEQ ID NO: 5435 - protein, 9 aa, Artificial Sequence
  Description of Artificial Sequence: Synthetic peptide
VQLGIPHPA

SEQ ID NO: 5436 - protein, 8 aa, Artificial Sequence
  Description of Artificial Sequence: Synthetic peptide
TEIVPLTA

SEQ ID NO: 5437 - protein, 8 aa, Artificial Sequence
  Description of Artificial Sequence: Synthetic peptide
DQIPIEIC

SEQ ID NO: 5438 - protein, 8 aa, Artificial Sequence
  Description of Artificial Sequence: Synthetic peptide
THGIKPVV

SEQ ID NO: 5439 - protein, 8 aa, Artificial Sequence
  Description of Artificial Sequence: Synthetic peptide
THGIRPVV

SEQ ID NO: 5440 - protein, 8 aa, Artificial Sequence
  Description of Artificial Sequence: Synthetic peptide
VHIPLGEA

SEQ ID NO: 5441 - protein, 9 aa, Artificial Sequence
  Description of Artificial Sequence: Synthetic peptide
HQNSQTHQA

SEQ ID NO: 5442 - protein, 8 aa, Artificial Sequence
  Description of Artificial Sequence: Synthetic peptide
MQRAEPAA

SEQ ID NO: 5443 - protein, 8 aa, Artificial Sequence
  Description of Artificial Sequence: Synthetic peptide
DQILVEIC

SEQ ID NO: 5444 - protein, 8 aa, Artificial Sequence
  Description of Artificial Sequence: Synthetic peptide
DQILIEIC

SEQ ID NO: 5445 - protein, 8 aa, Artificial Sequence
  Description of Artificial Sequence: Synthetic peptide
GRVILVAV

SEQ ID NO: 5446 - protein, 8 aa, Artificial Sequence
  Description of Artificial Sequence: Synthetic peptide
SMALTVQA

SEQ ID NO: 5447 - protein, 8 aa, Artificial Sequence
  Description of Artificial Sequence: Synthetic peptide
SMTLTVQA

SEQ ID NO: 5448 - protein, 9 aa, Artificial Sequence
  Description of Artificial Sequence: Synthetic peptide
SRLAFHHVA

SEQ ID NO: 5449 - protein, 8 aa, Artificial Sequence
  Description of Artificial Sequence: Synthetic peptide
GKVILVAV

SEQ ID NO: 5450 - protein, 9 aa, Artificial Sequence
  Description of Artificial Sequence: Synthetic peptide
MQGQMVHQA

SEQ ID NO: 5451 - protein, 9 aa, Artificial Sequence
  Description of Artificial Sequence: Synthetic peptide
EQVDKLVST

SEQ ID NO: 5452 - protein, 9 aa, Artificial Sequence
  Description of Artificial Sequence: Synthetic peptide
QQHLLQLTV

SEQ ID NO: 5453 - protein, 8 aa, Artificial Sequence
  Description of Artificial Sequence: Synthetic peptide
FQTHLPAP

SEQ ID NO: 5454 - protein, 8 aa, Artificial Sequence
  Description of Artificial Sequence: Synthetic peptide
TAFTIPSV

SEQ ID NO: 5455 - protein, 9 aa, Artificial Sequence
  Description of Artificial Sequence: Synthetic peptide
EKVDKLVSA

SEQ ID NO: 5456 - protein, 8 aa, Artificial Sequence
  Description of Artificial Sequence: Synthetic peptide
NAIAIAVA

SEQ ID NO: 5457 - protein, 8 aa, Artificial Sequence
  Description of Artificial Sequence: Synthetic peptide
HHYESTHP

SEQ ID NO: 5458 - protein, 9 aa, Artificial Sequence
  Description of Artificial Sequence: Synthetic peptide
MEDPEKEVL

SEQ ID NO: 5459 - protein, 10 aa, Artificial Sequence
  Description of Artificial Sequence: Synthetic peptide
IEIKDTKEAL

SEQ ID NO: 5460 - protein, 10 aa, Artificial Sequence
  Description of Artificial Sequence: Synthetic peptide
IEVKDTKEAL

SEQ ID NO: 5461 - protein, 9 aa, Artificial Sequence
  Description of Artificial Sequence: Synthetic peptide
REIDNYTSL

SEQ ID NO: 5462 - protein, 9 aa, Artificial Sequence
  Description of Artificial Sequence: Synthetic peptide
TEGSDTITL

SEQ ID NO: 5463 - protein, 9 aa, Artificial Sequence
  Description of Artificial Sequence: Synthetic peptide
REINNYTSL

SEQ ID NO: 5464 - protein, 10 aa, Artificial Sequence
  Description of Artificial Sequence: Synthetic peptide
SEAGATRISF

SEQ ID NO: 5465 - protein, 9 aa, Artificial Sequence
  Description of Artificial Sequence: Synthetic peptide
SEAKWNNTL

SEQ ID NO: 5466 - protein, 10 aa, Artificial Sequence
  Description of Artificial Sequence: Synthetic peptide
IEVRDTKEAL

SEQ ID NO: 5467 - protein, 9 aa, Artificial Sequence
  Description of Artificial Sequence: Synthetic peptide
GEISALVEM

SEQ ID NO: 5468 - protein, 10 aa, Artificial Sequence
  Description of Artificial Sequence: Synthetic peptide
QELKNSAVSL

SEQ ID NO: 5469 - protein, 9 aa, Artificial Sequence
  Description of Artificial Sequence: Synthetic peptide
TEPNSTITL

SEQ ID NO: 5470 - protein, 9 aa, Artificial Sequence
  Description of Artificial Sequence: Synthetic peptide
REINNYTGL

SEQ ID NO: 5471 - protein, 11 aa, Artificial Sequence
  Description of Artificial Sequence: Synthetic peptide
NEPNDGKNITL

SEQ ID NO: 5472 - protein, 9 aa, Artificial Sequence
  Description of Artificial Sequence: Synthetic peptide
SEGATPQDL

SEQ ID NO: 5473 - protein, 9 aa, Artificial Sequence
  Description of Artificial Sequence: Synthetic peptide
SESAIRNAI

SEQ ID NO: 5474 - protein, 8 aa, Artificial Sequence
  Description of Artificial Sequence: Synthetic peptide
IETVPVKL

SEQ ID NO: 5475 - protein, 11 aa, Artificial Sequence
  Description of Artificial Sequence: Synthetic peptide
SEIVSQIIEQL

SEQ ID NO: 5476 - protein, 10 aa, Artificial Sequence
  Description of Artificial Sequence: Synthetic peptide
SESAIRNAIL

SEQ ID NO: 5477 - protein, 10 aa, Artificial Sequence
  Description of Artificial Sequence: Synthetic peptide
QELRGSAVSL

SEQ ID NO: 5478 - protein, 9 aa, Artificial Sequence
  Description of Artificial Sequence: Synthetic peptide
KELYPLTSL

SEQ ID NO: 5479 - protein, 11 aa, Artificial Sequence
  Description of Artificial Sequence: Synthetic peptide
AEGTDRVIEVL

SEQ ID NO: 5480 - protein, 9 aa, Artificial Sequence
  Description of Artificial Sequence: Synthetic peptide
QEKNEQELL

SEQ ID NO: 5481 - protein, 10 aa, Artificial Sequence
  Description of Artificial Sequence: Synthetic peptide
MEDPEKEVLM

SEQ ID NO: 5482 - protein, 10 aa, Artificial Sequence
  Description of Artificial Sequence: Synthetic peptide
IEAQQHLLQL

SEQ ID NO: 5483 - protein, 9 aa, Artificial Sequence
  Description of Artificial Sequence: Synthetic peptide
SESEIVSQI

SEQ ID NO: 5484 - protein, 9 aa, Artificial Sequence
  Description of Artificial Sequence: Synthetic peptide
KELYPLTAL

SEQ ID NO: 5485 - protein, 10 aa, Artificial Sequence
  Description of Artificial Sequence: Synthetic peptide
AEHLKTAVQM

SEQ ID NO: 5486 - protein, 9 aa, Artificial Sequence
  Description of Artificial Sequence: Synthetic peptide
GEYSAGERI

SEQ ID NO: 5487 - protein, 8 aa, Artificial Sequence
  Description of Artificial Sequence: Synthetic peptide
IEAQQHLL

SEQ ID NO: 5488 - protein, 10 aa, Artificial Sequence
  Description of Artificial Sequence: Synthetic peptide
NESEGEISAL

SEQ ID NO: 5489 - protein, 8 aa, Artificial Sequence
  Description of Artificial Sequence: Synthetic peptide
GEERNITL

SEQ ID NO: 5490 - protein, 10 aa, Artificial Sequence
  Description of Artificial Sequence: Synthetic peptide
GEIIGDIRQA

SEQ ID NO: 5491 - protein, 9 aa, Artificial Sequence
  Description of Artificial Sequence: Synthetic peptide
SEAKWNNTL

SEQ ID NO: 5492 - protein, 10 aa, Artificial Sequence
  Description of Artificial Sequence: Synthetic peptide
SEAGATRISF

SEQ ID NO: 5493 - protein, 9 aa, Artificial Sequence
  Description of Artificial Sequence: Synthetic peptide
GEISALVEM

SEQ ID NO: 5494 - protein, 10 aa, Artificial Sequence
  Description of Artificial Sequence: Synthetic peptide
IEIKDTKEAL

SEQ ID NO: 5495 - protein, 8 aa, Artificial Sequence
  Description of Artificial Sequence: Synthetic peptide
TDIQTKEL

SEQ ID NO: 5496 - protein, 10 aa, Artificial Sequence
  Description of Artificial Sequence: Synthetic peptide
AEHLKTAVQM

SEQ ID NO: 5497 - protein, 9 aa, Artificial Sequence
  Description of Artificial Sequence: Synthetic peptide
GEVGFPVKP

SEQ ID NO: 5498 - protein, 9 aa, Artificial Sequence
  Description of Artificial Sequence: Synthetic peptide
SESAIRNAI

SEQ ID NO: 5499 - protein, 9 aa, Artificial Sequence
  Description of Artificial Sequence: Synthetic peptide
REIDNYTSL

SEQ ID NO: 5500 - protein, 10 aa, Artificial Sequence
  Description of Artificial Sequence: Synthetic peptide
IEVKDTKEAL

SEQ ID NO: 5501 - protein, 11 aa, Artificial Sequence
  Description of Artificial Sequence: Synthetic peptide
AEGTDRVIEVL

SEQ ID NO: 5502 - protein, 9 aa, Artificial Sequence
  Description of Artificial Sequence: Synthetic peptide
REINNYTSL

SEQ ID NO: 5503 - protein, 11 aa, Artificial Sequence
  Description of Artificial Sequence: Synthetic peptide
SEIVSQIIEQL

SEQ ID NO: 5504 - protein, 10 aa, Artificial Sequence
  Description of Artificial Sequence: Synthetic peptide
AEEEVVIRSV

SEQ ID NO: 5505 - protein, 10 aa, Artificial Sequence
  Description of Artificial Sequence: Synthetic peptide
QELKNSAVSL

SEQ ID NO: 5506 - protein, 9 aa, Artificial Sequence
  Description of Artificial Sequence: Synthetic peptide
SEWILSNHL

SEQ ID NO: 5507 - protein, 10 aa, Artificial Sequence
  Description of Artificial Sequence: Synthetic peptide
IEAQQHLLQL

SEQ ID NO: 5508 - protein, 10 aa, Artificial Sequence
  Description of Artificial Sequence: Synthetic peptide
SESAIRNAIL

SEQ ID NO: 5509 - protein, 8 aa, Artificial Sequence
  Description of Artificial Sequence: Synthetic peptide
IETVPVKL

SEQ ID NO: 5510 - protein, 9 aa, Artificial Sequence
  Description of Artificial Sequence: Synthetic peptide
YETEVHNVW

SEQ ID NO: 5511 - protein, 9 aa, Artificial Sequence
  Description of Artificial Sequence: Synthetic peptide
NETVDIHCI

SEQ ID NO: 5512 - protein, 9 aa, Artificial Sequence
  Description of Artificial Sequence: Synthetic peptide
KELYPLTSL

SEQ ID NO: 5513 - protein, 9 aa, Artificial Sequence
  Description of Artificial Sequence: Synthetic peptide
TEGSDTITL

SEQ ID NO: 5514 - protein, 9 aa, Artificial Sequence
  Description of Artificial Sequence: Synthetic peptide
ADSPTSREL

SEQ ID NO: 5515 - protein, 9 aa, Artificial Sequence
  Description of Artificial Sequence: Synthetic peptide
AEWDRVHPV

SEQ ID NO: 5516 - protein, 8 aa, Artificial Sequence
  Description of Artificial Sequence: Synthetic peptide
TELQAIHL

SEQ ID NO: 5517 - protein, 9 aa, Artificial Sequence
  Description of Artificial Sequence: Synthetic peptide
SDSAIRNAL

SEQ ID NO: 5518 - protein, 9 aa, Artificial Sequence
  Description of Artificial Sequence: Synthetic peptide
MEDPEKEVL

SEQ ID NO: 5519 - protein, 8 aa, Artificial Sequence
  Description of Artificial Sequence: Synthetic peptide
IEAQQHLL

SEQ ID NO: 5520 - protein, 8 aa, Artificial Sequence
  Description of Artificial Sequence: Synthetic peptide
YESTHPKI

SEQ ID NO: 5521 - protein, 9 aa, Artificial Sequence
  Description of Artificial Sequence: Synthetic peptide
SDFNLPPVV

SEQ ID NO: 5522 - protein, 10 aa, Artificial Sequence
  Description of Artificial Sequence: Synthetic peptide
IEVRDTKEAL

SEQ ID NO: 5523 - protein, 9 aa, Artificial Sequence
  Description of Artificial Sequence: Synthetic peptide
SESEIVSQI

SEQ ID NO: 5524 - protein, 10 aa, Artificial Sequence
  Description of Artificial Sequence: Synthetic peptide
QDSQTHQVSL

SEQ ID NO: 5525 - protein, 10 aa, Artificial Sequence
  Description of Artificial Sequence: Synthetic peptide
AEAMSQVTSA

SEQ ID NO: 5526 - protein, 9 aa, Artificial Sequence
  Description of Artificial Sequence: Synthetic peptide
KELYPLTAL

SEQ ID NO: 5527 - protein, 11 aa, Artificial Sequence
  Description of Artificial Sequence: Synthetic peptide
SELVNQIIEQL

SEQ ID NO: 5528 - protein, 8 aa, Artificial Sequence
  Description of Artificial Sequence: Synthetic peptide
TDRVIEVL

SEQ ID NO: 5529 - protein, 9 aa, Artificial Sequence
  Description of Artificial Sequence: Synthetic peptide
SEGATPQDL

SEQ ID NO: 5530 - protein, 8 aa, Artificial Sequence
  Description of Artificial Sequence: Synthetic peptide
EEVVIRSV

SEQ ID NO: 5531 - protein, 11 aa, Artificial Sequence
  Description of Artificial Sequence: Synthetic peptide
SELVSQIIEQL

SEQ ID NO: 5532 - protein, 9 aa, Artificial Sequence
  Description of Artificial Sequence: Synthetic peptide
EEEVVIRSV

SEQ ID NO: 5533 - protein, 9 aa, Artificial Sequence
  Description of Artificial Sequence: Synthetic peptide
REINNYTGL

SEQ ID NO: 5534 - protein, 8 aa, Artificial Sequence
  Description of Artificial Sequence: Synthetic peptide
NDTTSYKL

SEQ ID NO: 5535 - protein, 9 aa, Artificial Sequence
  Description of Artificial Sequence: Synthetic peptide
LEKEPIVGA

SEQ ID NO: 5536 - protein, 8 aa, Artificial Sequence
  Description of Artificial Sequence: Synthetic peptide
YETEVHNV

SEQ ID NO: 5537 - protein, 10 aa, Artificial Sequence
  Description of Artificial Sequence: Synthetic peptide
QELRGSAVSL

SEQ ID NO: 5538 - protein, 9 aa, Artificial Sequence
  Description of Artificial Sequence: Synthetic peptide
SESELVNQI

SEQ ID NO: 5539 - protein, 8 aa, Artificial Sequence
  Description of Artificial Sequence: Synthetic peptide
AELVVTTY

SEQ ID NO: 5540 - protein, 9 aa, Artificial Sequence
  Description of Artificial Sequence: Synthetic peptide
GEVGFPVKP

SEQ ID NO: 5541 - protein, 10 aa, Artificial Sequence
  Description of Artificial Sequence: Synthetic peptide
GEIIGDIRQA

SEQ ID NO: 5542 - protein, 9 aa, Artificial Sequence
  Description of Artificial Sequence: Synthetic peptide
AEWDRIHPA

SEQ ID NO: 5543 - protein, 9 aa, Artificial Sequence
  Description of Artificial Sequence: Synthetic peptide
LEKEPIVGA

SEQ ID NO: 5544 - protein, 10 aa, Artificial Sequence
  Description of Artificial Sequence: Synthetic peptide
REFSSEQTRA

SEQ ID NO: 5545 - protein, 9 aa, Artificial Sequence
  Description of Artificial Sequence: Synthetic peptide
EEVGFPVTP

SEQ ID NO: 5546 - protein, 9 aa, Artificial Sequence
  Description of Artificial Sequence: Synthetic peptide
RETETHPDA

SEQ ID NO: 5547 - protein, 9 aa, Artificial Sequence
  Description of Artificial Sequence: Synthetic peptide
IEIKDTKEA

SEQ ID NO: 5548 - protein, 10 aa, Artificial Sequence
  Description of Artificial Sequence: Synthetic peptide
GEIIGDIRRA

SEQ ID NO: 5549 - protein, 9 aa, Artificial Sequence
  Description of Artificial Sequence: Synthetic peptide
TELQAIHLA

SEQ ID NO: 5550 - protein, 9 aa, Artificial Sequence
  Description of Artificial Sequence: Synthetic peptide
TETLLVQNA

SEQ ID NO: 5551 - protein, 9 aa, Artificial Sequence
  Description of Artificial Sequence: Synthetic peptide
EEVGFPVRP

SEQ ID NO: 5552 - protein, 10 aa, Artificial Sequence
  Description of Artificial Sequence: Synthetic peptide
AEAMSQVTSA

SEQ ID NO: 5553 - protein, 11 aa, Artificial Sequence
  Description of Artificial Sequence: Synthetic peptide
AEWDRIHPAQA

SEQ ID NO: 5554 - protein, 8 aa, Artificial Sequence
  Description of Artificial Sequence: Synthetic peptide
TEIVPLTA

SEQ ID NO: 5555 - protein, 10 aa, Artificial Sequence
  Description of Artificial Sequence: Synthetic peptide
TEIVPLTAEA

SEQ ID NO: 5556 - protein, 11 aa, Artificial Sequence
  Description of Artificial Sequence: Synthetic peptide
AEAMSQVTNSA

SEQ ID NO: 5557 - protein, 10 aa, Artificial Sequence
  Description of Artificial Sequence: Synthetic peptide
SEVHIPLGEA

SEQ ID NO: 5558 - protein, 9 aa, Artificial Sequence
  Description of Artificial Sequence: Synthetic peptide
IEVKDTKEA

SEQ ID NO: 5559 - protein, 9 aa, Artificial Sequence
  Description of Artificial Sequence: Synthetic peptide
QEFGIPYNP

SEQ ID NO: 5560 - protein, 9 aa, Artificial Sequence
  Description of Artificial Sequence: Synthetic peptide
AEWDRVHPV

SEQ ID NO: 5561 - protein, 9 aa, Artificial Sequence
  Description of Artificial Sequence: Synthetic peptide
QEVGKAMYA

SEQ ID NO: 5562 - protein, 9 aa, Artificial Sequence
  Description of Artificial Sequence: Synthetic peptide
GENTSLLHP

SEQ ID NO: 5563 - protein, 10 aa, Artificial Sequence
  Description of Artificial Sequence: Synthetic peptide
AEEEVVIRSV

SEQ ID NO: 5564 - protein, 10 aa, Artificial Sequence
  Description of Artificial Sequence: Synthetic peptide
SDFNLPPVVA

SEQ ID NO: 5565 - protein, 10 aa, Artificial Sequence
  Description of Artificial Sequence: Synthetic peptide
TEVVPLTKEA

SEQ ID NO: 5566 - protein, 8 aa, Artificial Sequence
  Description of Artificial Sequence: Synthetic peptide
NETEIFRP

SEQ ID NO: 5567 - protein, 9 aa, Artificial Sequence
  Description of Artificial Sequence: Synthetic peptide
GEASLVIKT

SEQ ID NO: 5568 - protein, 9 aa, Artificial Sequence
  Description of Artificial Sequence: Synthetic peptide
GEISALVEM

SEQ ID NO: 5569 - protein, 9 aa, Artificial Sequence
  Description of Artificial Sequence: Synthetic peptide
SESAIRNAI

SEQ ID NO: 5570 - protein, 10 aa, Artificial Sequence
  Description of Artificial Sequence: Synthetic peptide
SEAGATRISF

SEQ ID NO: 5571 - protein, 8 aa, Artificial Sequence
  Description of Artificial Sequence: Synthetic peptide
TDIQTKEL

SEQ ID NO: 5572 - protein, 9 aa, Artificial Sequence
  Description of Artificial Sequence: Synthetic peptide
SDSAIRNAL

SEQ ID NO: 5573 - protein, 8 aa, Artificial Sequence
  Description of Artificial Sequence: Synthetic peptide
AEHLKTAV

SEQ ID NO: 5574 - protein, 9 aa, Artificial Sequence
  Description of Artificial Sequence: Synthetic peptide
SEAKWNNTL

SEQ ID NO: 5575 - protein, 8 aa, Artificial Sequence
  Description of Artificial Sequence: Synthetic peptide
TDRVIEVL

SEQ ID NO: 5576 - protein, 9 aa, Artificial Sequence
  Description of Artificial Sequence: Synthetic peptide
ADSPTSREL

SEQ ID NO: 5577 - protein, 9 aa, Artificial Sequence
  Description of Artificial Sequence: Synthetic peptide
MEDPEKEVL

SEQ ID NO: 5578 - protein, 9 aa, Artificial Sequence
  Description of Artificial Sequence: Synthetic peptide
QEKNEQELL

SEQ ID NO: 5579 - protein, 9 aa, Artificial Sequence
  Description of Artificial Sequence: Synthetic peptide
REIDNYTSL

SEQ ID NO: 5580 - protein, 9 aa, Artificial Sequence
  Description of Artificial Sequence: Synthetic peptide
SDSAIRKAL

SEQ ID NO: 5581 - protein, 10 aa, Artificial Sequence
  Description of Artificial Sequence: Synthetic peptide
SESAIRNAIL

SEQ ID NO: 5582 - protein, 9 aa, Artificial Sequence
  Description of Artificial Sequence: Synthetic peptide
REINNYTSL

SEQ ID NO: 5583 - protein, 9 aa, Artificial Sequence
  Description of Artificial Sequence: Synthetic peptide
GEISALVEM

SEQ ID NO: 5584 - protein, 8 aa, Artificial Sequence
  Description of Artificial Sequence: Synthetic peptide
IEAQQHLL

SEQ ID NO: 5585 - protein, 9 aa, Artificial Sequence
  Description of Artificial Sequence: Synthetic peptide
AEMEKEGKI

SEQ ID NO: 5586 - protein, 9 aa, Artificial Sequence
  Description of Artificial Sequence: Synthetic peptide
KEKGGLEGL

SEQ ID NO: 5587 - protein, 9 aa, Artificial Sequence
  Description of Artificial Sequence: Synthetic peptide
YETEVHNVW

SEQ ID NO: 5588 - protein, 8 aa, Artificial Sequence
  Description of Artificial Sequence: Synthetic peptide
TELQAIHL

SEQ ID NO: 5589 - protein, 9 aa, Artificial Sequence
  Description of Artificial Sequence: Synthetic peptide
SERILGTYL

SEQ ID NO: 5590 - protein, 9 aa, Artificial Sequence
  Description of Artificial Sequence: Synthetic peptide
LEKEPIVGA

SEQ ID NO: 5591 - protein, 10 aa, Artificial Sequence
  Description of Artificial Sequence: Synthetic peptide
AEHLKTAVQM

SEQ ID NO: 5592 - protein, 8 aa, Artificial Sequence
  Description of Artificial Sequence: Synthetic peptide
SEIVSQII

SEQ ID NO: 5593 - protein, 9 aa, Artificial Sequence
  Description of Artificial Sequence: Synthetic peptide
ADRQGTVSF

SEQ ID NO: 5594 - protein, 8 aa, Artificial Sequence
  Description of Artificial Sequence: Synthetic peptide
IETIQRAF

SEQ ID NO: 5595 - protein, 8 aa, Artificial Sequence
  Description of Artificial Sequence: Synthetic peptide
TERQANFL

SEQ ID NO: 5596 - protein, 9 aa, Artificial Sequence
  Description of Artificial Sequence: Synthetic peptide
KELYPLTSL

SEQ ID NO: 5597 - protein, 10 aa, Artificial Sequence
  Description of Artificial Sequence: Synthetic peptide
IEIKDTKEAL

SEQ ID NO: 5598 - protein, 8 aa, Artificial Sequence
  Description of Artificial Sequence: Synthetic peptide
GERIVDII

SEQ ID NO: 5599 - protein, 9 aa, Artificial Sequence
  Description of Artificial Sequence: Synthetic peptide
REINNYTGL

SEQ ID NO: 5600 - protein, 9 aa, Artificial Sequence
  Description of Artificial Sequence: Synthetic peptide
KELYPLTAL

SEQ ID NO: 5601 - protein, 10 aa, Artificial Sequence
  Description of Artificial Sequence: Synthetic peptide
QELKNSAVSL

SEQ ID NO: 5602 - protein, 9 aa, Artificial Sequence
  Description of Artificial Sequence: Synthetic peptide
TEMEKEGKI

SEQ ID NO: 5603 - protein, 8 aa, Artificial Sequence
  Description of Artificial Sequence: Synthetic peptide
ADQLIHVY

SEQ ID NO: 5604 - protein, 8 aa, Artificial Sequence
  Description of Artificial Sequence: Synthetic peptide
AELVVTTY

SEQ ID NO: 5605 - protein, 8 aa, Artificial Sequence
  Description of Artificial Sequence: Synthetic peptide
YESTHPKI

SEQ ID NO: 5606 - protein, 9 aa, Artificial Sequence
  Description of Artificial Sequence: Synthetic peptide
ANSPTRREL

SEQ ID NO: 5607 - protein, 9 aa, Artificial Sequence
  Description of Artificial Sequence: Synthetic peptide
IEISGHKTI

SEQ ID NO: 5608 - protein, 9 aa, Artificial Sequence
  Description of Artificial Sequence: Synthetic peptide
AEWDRVHPV

SEQ ID NO: 5609 - protein, 9 aa, Artificial Sequence
  Description of Artificial Sequence: Synthetic peptide
TEGSDTITL

SEQ ID NO: 5610 - protein, 11 aa, Artificial Sequence
  Description of Artificial Sequence: Synthetic peptide
AEQASQEVKNW

SEQ ID NO: 5611 - protein, 10 aa, Artificial Sequence
  Description of Artificial Sequence: Synthetic peptide
SEAGATRISF

SEQ ID NO: 5612 - protein, 10 aa, Artificial Sequence
  Description of Artificial Sequence: Synthetic peptide
GEASLVIKTY

SEQ ID NO: 5613 - protein, 9 aa, Artificial Sequence
  Description of Artificial Sequence: Synthetic peptide
YETEVHNVW

SEQ ID NO: 5614 - protein, 9 aa, Artificial Sequence
  Description of Artificial Sequence: Synthetic peptide
AELVVTTYW

SEQ ID NO: 5615 - protein, 11 aa, Artificial Sequence
  Description of Artificial Sequence: Synthetic peptide
TENSSQVSQNY

SEQ ID NO: 5616 - protein, 9 aa, Artificial Sequence
  Description of Artificial Sequence: Synthetic peptide
AENLWVTVY

SEQ ID NO: 5617 - protein, 9 aa, Artificial Sequence
  Description of Artificial Sequence: Synthetic peptide
EEMNLPGRW

SEQ ID NO: 5618 - protein, 9 aa, Artificial Sequence
  Description of Artificial Sequence: Synthetic peptide
EEMDLPGRW

SEQ ID NO: 5619 - protein, 9 aa, Artificial Sequence
  Description of Artificial Sequence: Synthetic peptide
SESAIRNAI

SEQ ID NO: 5620 - protein, 11 aa, Artificial Sequence
  Description of Artificial Sequence: Synthetic peptide
AEIQKQGQGQW

SEQ ID NO: 5621 - protein, 9 aa, Artificial Sequence
  Description of Artificial Sequence: Synthetic peptide
AEQLWVTVY

SEQ ID NO: 5622 - protein, 10 aa, Artificial Sequence
  Description of Artificial Sequence: Synthetic peptide
EEVVIRSVNF

SEQ ID NO: 5623 - protein, 9 aa, Artificial Sequence
  Description of Artificial Sequence: Synthetic peptide
SEIWNNMTW

SEQ ID NO: 5624 - protein, 10 aa, Artificial Sequence
  Description of Artificial Sequence: Synthetic peptide
GEAKLVITTY

SEQ ID NO: 5625 - protein, 9 aa, Artificial Sequence
  Description of Artificial Sequence: Synthetic peptide
AEMEKEGKI

SEQ ID NO: 5626 - protein, 10 aa, Artificial Sequence
  Description of Artificial Sequence: Synthetic peptide
EEVVIRSENF

SEQ ID NO: 5627 - protein, 9 aa, Artificial Sequence
  Description of Artificial Sequence: Synthetic peptide
QELLGLDKW

SEQ ID NO: 5628 - protein, 9 aa, Artificial Sequence
  Description of Artificial Sequence: Synthetic peptide
EEMSLPGRW

SEQ ID NO: 5629 - protein, 11 aa, Artificial Sequence
  Description of Artificial Sequence: Synthetic peptide
NEQELLGLDKW

SEQ ID NO: 5630 - protein, 10 aa, Artificial Sequence
  Description of Artificial Sequence: Synthetic peptide
NETPGIRYQY

SEQ ID NO: 5631 - protein, 11 aa, Artificial Sequence
  Description of Artificial Sequence: Synthetic peptide
GEASLVIKTYW

SEQ ID NO: 5632 - protein, 9 aa, Artificial Sequence
  Description of Artificial Sequence: Synthetic peptide
AETGQETAY

SEQ ID NO: 5633 - protein, 9 aa, Artificial Sequence
  Description of Artificial Sequence: Synthetic peptide
QELLALDTW

SEQ ID NO: 5634 - protein, 9 aa, Artificial Sequence
  Description of Artificial Sequence: Synthetic peptide
DEIWNNMTW

SEQ ID NO: 5635 - protein, 9 aa, Artificial Sequence
  Description of Artificial Sequence: Synthetic peptide
EEMEAKGEM

SEQ ID NO: 5636 - protein, 9 aa, Artificial Sequence
  Description of Artificial Sequence: Synthetic peptide
SESEIVSQI

SEQ ID NO: 5637 - protein, 10 aa, Artificial Sequence
  Description of Artificial Sequence: Synthetic peptide
AEQLWVTVYY

SEQ ID NO: 5638 - protein, 10 aa, Artificial Sequence
  Description of Artificial Sequence: Synthetic peptide
GEASLVIKTY

SEQ ID NO: 5639 - protein, 10 aa, Artificial Sequence
  Description of Artificial Sequence: Synthetic peptide
SEAGATRISF

SEQ ID NO: 5640 - protein, 9 aa, Artificial Sequence
  Description of Artificial Sequence: Synthetic peptide
YETEVHNVW

SEQ ID NO: 5641 - protein, 11 aa, Artificial Sequence
  Description of Artificial Sequence: Synthetic peptide
AEQASQEVKNW

SEQ ID NO: 5642 - protein, 11 aa, Artificial Sequence
  Description of Artificial Sequence: Synthetic peptide
GEASLVIKTYW

SEQ ID NO: 5643 - protein, 11 aa, Artificial Sequence
  Description of Artificial Sequence: Synthetic peptide
TENSSQVSQNY

SEQ ID NO: 5644 - protein, 11 aa, Artificial Sequence
  Description of Artificial Sequence: Synthetic peptide
AEIQKQGQGQW

SEQ ID NO: 5645 - protein, 10 aa, Artificial Sequence
  Description of Artificial Sequence: Synthetic peptide
GEAKLVITTY

SEQ ID NO: 5646 - protein, 9 aa, Artificial Sequence
  Description of Artificial Sequence: Synthetic peptide
EEMNLPGRW

SEQ ID NO: 5647 - protein, 10 aa, Artificial Sequence
  Description of Artificial Sequence: Synthetic peptide
EEVVIRSENF

SEQ ID NO: 5648 - protein, 9 aa, Artificial Sequence
  Description of Artificial Sequence: Synthetic peptide
EEMDLPGRW

SEQ ID NO: 5649 - protein, 10 aa, Artificial Sequence
  Description of Artificial Sequence: Synthetic peptide
EEVVIRSVNF

SEQ ID NO: 5650 - protein, 9 aa, Artificial Sequence
  Description of Artificial Sequence: Synthetic peptide
SESAIRNAI

SEQ ID NO: 5651 - protein, 9 aa, Artificial Sequence
  Description of Artificial Sequence: Synthetic peptide
AELVVTTYW

SEQ ID NO: 5652 - protein, 9 aa, Artificial Sequence
  Description of Artificial Sequence: Synthetic peptide
AENLWVTVY

SEQ ID NO: 5653 - protein, 9 aa, Artificial Sequence
  Description of Artificial Sequence: Synthetic peptide
QELLGLDKW

SEQ ID NO: 5654 - protein, 9 aa, Artificial Sequence
  Description of Artificial Sequence: Synthetic peptide
SEIWNNMTW

SEQ ID NO: 5655 - protein, 9 aa, Artificial Sequence
  Description of Artificial Sequence: Synthetic peptide
AEMEKEGKI

SEQ ID NO: 5656 - protein, 10 aa, Artificial Sequence
  Description of Artificial Sequence: Synthetic peptide
NETPGIRYQY

SEQ ID NO: 5657 - protein, 11 aa, Artificial Sequence
  Description of Artificial Sequence: Synthetic peptide
NEQELLGLDKW

SEQ ID NO: 5658 - protein, 9 aa, Artificial Sequence
  Description of Artificial Sequence: Synthetic peptide
SESEIVSQI

SEQ ID NO: 5659 - protein, 11 aa, Artificial Sequence
  Description of Artificial Sequence: Synthetic peptide
LEVNIVTDSQY

SEQ ID NO: 5660 - protein, 9 aa, Artificial Sequence
  Description of Artificial Sequence: Synthetic peptide
EEMSLPGRW

SEQ ID NO: 5661 - protein, 9 aa, Artificial Sequence
  Description of Artificial Sequence: Synthetic peptide
QETIDKELY

SEQ ID NO: 5662 - protein, 9 aa, Artificial Sequence
  Description of Artificial Sequence: Synthetic peptide
SESELVNQI

SEQ ID NO: 5663 - protein, 11 aa, Artificial Sequence
  Description of Artificial Sequence: Synthetic peptide
NELDLLQLDKW

SEQ ID NO: 5664 - protein, 9 aa, Artificial Sequence
  Description of Artificial Sequence: Synthetic peptide
QELLELDKW

SEQ ID NO: 5665 - protein, 9 aa, Artificial Sequence
  Description of Artificial Sequence: Synthetic peptide
AEQLWVTVY

SEQ ID NO: 5666 - protein, 11 aa, Artificial Sequence
  Description of Artificial Sequence: Synthetic peptide
GEAKLVITTYW

SEQ ID NO: 5667 - protein, 10 aa, Artificial Sequence
  Description of Artificial Sequence: Synthetic peptide
MEWDREINNY

SEQ ID NO: 5668 - protein, 9 aa, Artificial Sequence
  Description of Artificial Sequence: Synthetic peptide
DEIWNNMTW

SEQ ID NO: 5669 - protein, 9 aa, Artificial Sequence
  Description of Artificial Sequence: Synthetic peptide
QELLALDTW

SEQ ID NO: 5670 - protein, 9 aa, Artificial Sequence
  Description of Artificial Sequence: Synthetic peptide
AETGQETAY

SEQ ID NO: 5671 - protein, 9 aa, Artificial Sequence
  Description of Artificial Sequence: Synthetic peptide
EEMEAKGEM

SEQ ID NO: 5672 - protein, 9 aa, Artificial Sequence
  Description of Artificial Sequence: Synthetic peptide
TEMEKEGKI

SEQ ID NO: 5673 - protein, 9 aa, Artificial Sequence
  Description of Artificial Sequence: Synthetic peptide
TENLWVTVY

SEQ ID NO: 5674 - protein, 9 aa, Artificial Sequence
  Description of Artificial Sequence: Synthetic peptide
SESELVSQI

SEQ ID NO: 5675 - protein, 10 aa, Artificial Sequence
  Description of Artificial Sequence: Synthetic peptide
EEHEKYHSNW

SEQ ID NO: 5676 - protein, 8 aa, Artificial Sequence
  Description of Artificial Sequence: Synthetic peptide
AELVVTTY

SEQ ID NO: 5677 - protein, 10 aa, Artificial Sequence
  Description of Artificial Sequence: Synthetic peptide
EEHEKYHNNW

SEQ ID NO: 5678 - protein, 11 aa, Artificial Sequence
  Description of Artificial Sequence: Synthetic peptide
NEQELLALDTW

SEQ ID NO: 5679 - protein, 10 aa, Artificial Sequence
  Description of Artificial Sequence: Synthetic peptide
AETGQETAYF

SEQ ID NO: 5680 - protein, 10 aa, Artificial Sequence
  Description of Artificial Sequence: Synthetic peptide
AEQLWVTVYY

SEQ ID NO: 5681 - protein, 9 aa, Artificial Sequence
  Description of Artificial Sequence: Synthetic peptide
QEEEGEVGF

SEQ ID NO: 5682 - protein, 9 aa, Artificial Sequence
  Description of Artificial Sequence: Synthetic peptide
EASLVIKTY

SEQ ID NO: 5683 - protein, 8 aa, Artificial Sequence
  Description of Artificial Sequence: Synthetic peptide
NETPGIRY

SEQ ID NO: 5684 - protein, 9 aa, Artificial Sequence
  Description of Artificial Sequence: Synthetic peptide
YDTEVHNVW

SEQ ID NO: 5685 - protein, 9 aa, Artificial Sequence
  Description of Artificial Sequence: Synthetic peptide
SEWILSNHL

SEQ ID NO: 5686 - protein, 11 aa, Artificial Sequence
  Description of Artificial Sequence: Synthetic peptide
EEDVVIRSKNF

SEQ ID NO: 5687 - protein, 9 aa, Artificial Sequence
  Description of Artificial Sequence: Synthetic peptide
NETVDIHCI

SEQ ID NO: 5688 - protein, 10 aa, Artificial Sequence
  Description of Artificial Sequence: Synthetic peptide
SEAGATRISF

SEQ ID NO: 5689 - protein, 10 aa, Artificial Sequence
  Description of Artificial Sequence: Synthetic peptide
EEVVIRSVNF

SEQ ID NO: 5690 - protein, 10 aa, Artificial Sequence
  Description of Artificial Sequence: Synthetic peptide
EEVVIRSENF

SEQ ID NO: 5691 - protein, 9 aa, Artificial Sequence
  Description of Artificial Sequence: Synthetic peptide
SESAIRNAI

SEQ ID NO: 5692 - protein, 11 aa, Artificial Sequence
  Description of Artificial Sequence: Synthetic peptide
AEIQKQGQGQW

SEQ ID NO: 5693 - protein, 9 aa, Artificial Sequence
  Description of Artificial Sequence: Synthetic peptide
QEEEGEVGF

SEQ ID NO: 5694 - protein, 9 aa, Artificial Sequence
  Description of Artificial Sequence: Synthetic peptide
SEAKWNNTL

SEQ ID NO: 5695 - protein, 11 aa, Artificial Sequence
  Description of Artificial Sequence: Synthetic peptide
AEQASQEVKNW

SEQ ID NO: 5696 - protein, 9 aa, Artificial Sequence
  Description of Artificial Sequence: Synthetic peptide
AEMEKEGKI

SEQ ID NO: 5697 - protein, 10 aa, Artificial Sequence
  Description of Artificial Sequence: Synthetic peptide
AETGQETAYF

SEQ ID NO: 5698 - protein, 9 aa, Artificial Sequence
  Description of Artificial Sequence: Synthetic peptide
EELLQTVRL

SEQ ID NO: 5699 - protein, 11 aa, Artificial Sequence
  Description of Artificial Sequence: Synthetic peptide
EEEVVIRSVNF

SEQ ID NO: 5700 - protein, 9 aa, Artificial Sequence
  Description of Artificial Sequence: Synthetic peptide
YETEVHNVW

SEQ ID NO: 5701 - protein, 10 aa, Artificial Sequence
  Description of Artificial Sequence: Synthetic peptide
QELKNSAVSL

SEQ ID NO: 5702 - protein, 9 aa, Artificial Sequence
  Description of Artificial Sequence: Synthetic peptide
REIDNYTSL

SEQ ID NO: 5703 - protein, 11 aa, Artificial Sequence
  Description of Artificial Sequence: Synthetic peptide
AELELAENREI

SEQ ID NO: 5704 - protein, 11 aa, Artificial Sequence
  Description of Artificial Sequence: Synthetic peptide
SEIVSQIIEQL

SEQ ID NO: 5705 - protein, 9 aa, Artificial Sequence
  Description of Artificial Sequence: Synthetic peptide
SESEIVSQI

SEQ ID NO: 5706 - protein, 10 aa, Artificial Sequence
  Description of Artificial Sequence: Synthetic peptide
KEPIVGAETF

SEQ ID NO: 5707 - protein, 9 aa, Artificial Sequence
  Description of Artificial Sequence: Synthetic peptide
REINNYTSL

SEQ ID NO: 5708 - protein, 9 aa, Artificial Sequence
  Description of Artificial Sequence: Synthetic peptide
NETVDIHCI

SEQ ID NO: 5709 - protein, 9 aa, Artificial Sequence
  Description of Artificial Sequence: Synthetic peptide
EEMEAKGEM

SEQ ID NO: 5710 - protein, 10 aa, Artificial Sequence
  Description of Artificial Sequence: Synthetic peptide
AEHLKTAVQM

SEQ ID NO: 5711 - protein, 9 aa, Artificial Sequence
  Description of Artificial Sequence: Synthetic peptide
TEMEKEGKI

SEQ ID NO: 5712 - protein, 9 aa, Artificial Sequence
  Description of Artificial Sequence: Synthetic peptide
SESELVNQI

SEQ ID NO: 5713 - protein, 10 aa, Artificial Sequence
  Description of Artificial Sequence: Synthetic peptide
SESAIRNAIL

SEQ ID NO: 5714 - protein, 11 aa, Artificial Sequence
  Description of Artificial Sequence: Synthetic peptide
AEQMHEDIISL

SEQ ID NO: 5715 - protein, 9 aa, Artificial Sequence
  Description of Artificial Sequence: Synthetic peptide
KEQFNNNTI

SEQ ID NO: 5716 - protein, 9 aa, Artificial Sequence
  Description of Artificial Sequence: Synthetic peptide
EEEVVIRSV

SEQ ID NO: 5717 - protein, 9 aa, Artificial Sequence
  Description of Artificial Sequence: Synthetic peptide
AEQMHEDII

SEQ ID NO: 5718 - protein, 10 aa, Artificial Sequence
  Description of Artificial Sequence: Synthetic peptide
AEEEVVIRSV

SEQ ID NO: 5719 - protein, 9 aa, Artificial Sequence
  Description of Artificial Sequence: Synthetic peptide
GEISALVEM

SEQ ID NO: 5720 - protein, 9 aa, Artificial Sequence
  Description of Artificial Sequence: Synthetic peptide
SEGATPQDL

SEQ ID NO: 5721 - protein, 11 aa, Artificial Sequence
  Description of Artificial Sequence: Synthetic peptide
AEGTDRVIEVL

SEQ ID NO: 5722 - protein, 11 aa, Artificial Sequence
  Description of Artificial Sequence: Synthetic peptide
QELKNSAVSLL

SEQ ID NO: 5723 - protein, 11 aa, Artificial Sequence
  Description of Artificial Sequence: Synthetic peptide
SELVNQIIEQL

SEQ ID NO: 5724 - protein, 9 aa, Artificial Sequence
  Description of Artificial Sequence: Synthetic peptide
EEMNLPGRW

SEQ ID NO: 5725 - protein, 9 aa, Artificial Sequence
  Description of Artificial Sequence: Synthetic peptide
REINNYTGL

SEQ ID NO: 5726 - protein, 9 aa, Artificial Sequence
  Description of Artificial Sequence: Synthetic peptide
SESELVSQI

SEQ ID NO: 5727 - protein, 10 aa, Artificial Sequence
  Description of Artificial Sequence: Synthetic peptide
EELKSLFNTI

SEQ ID NO: 5728 - protein, 11 aa, Artificial Sequence
  Description of Artificial Sequence: Synthetic peptide
AEGTDRVIETI

SEQ ID NO: 5729 - protein, 10 aa, Artificial Sequence
  Description of Artificial Sequence: Synthetic peptide
AEGTDRVIEI

SEQ ID NO: 5730 - protein, 9 aa, Artificial Sequence
  Description of Artificial Sequence: Synthetic peptide
TEGSDTITL

SEQ ID NO: 5731 - protein, 9 aa, Artificial Sequence
  Description of Artificial Sequence: Synthetic peptide
MEDPEKEVL

SEQ ID NO: 5732 - protein, 11 aa, Artificial Sequence
  Description of Artificial Sequence: Synthetic peptide
EEDVIIRSDNF

SEQ ID NO: 5733 - protein, 11 aa, Artificial Sequence
  Description of Artificial Sequence: Synthetic peptide
KEQFNNNTIVF

SEQ ID NO: 5734 - protein, 11 aa, Artificial Sequence
  Description of Artificial Sequence: Synthetic peptide
EEEVVIRSENF

SEQ ID NO: 5735 - protein, 9 aa, Artificial Sequence
  Description of Artificial Sequence: Synthetic peptide
QEKNEQELL

SEQ ID NO: 5736 - protein, 10 aa, Artificial Sequence
  Description of Artificial Sequence: Synthetic peptide
IEIKDTKEAL

SEQ ID NO: 5737 - protein, 9 aa, Artificial Sequence
  Description of Artificial Sequence: Synthetic peptide
ADSPTSREL

SEQ ID NO: 5738 - protein, 11 aa, Artificial Sequence
  Description of Artificial Sequence: Synthetic peptide
NEQELLGLDKW

SEQ ID NO: 5739 - protein, 11 aa, Artificial Sequence
  Description of Artificial Sequence: Synthetic peptide
SELVSQIIEQL

SEQ ID NO: 5740 - protein, 9 aa, Artificial Sequence
  Description of Artificial Sequence: Synthetic peptide
EEMDLPGRW

SEQ ID NO: 5741 - protein, 8 aa, Artificial Sequence
  Description of Artificial Sequence: Synthetic peptide
SEAGATRI

SEQ ID NO: 5742 - protein, 10 aa, Artificial Sequence
  Description of Artificial Sequence: Synthetic peptide
GDPEIVTHSF

SEQ ID NO: 5743 - protein, 10 aa, Artificial Sequence
  Description of Artificial Sequence: Synthetic peptide
EELRSLYNTI

SEQ ID NO: 5744 - protein, 11 aa, Artificial Sequence
  Description of Artificial Sequence: Synthetic peptide
TENSSQVSQNY

SEQ ID NO: 5745 - protein, 10 aa, Artificial Sequence
  Description of Artificial Sequence: Synthetic peptide
QELRGSAVSL

SEQ ID NO: 5746 - protein, 11 aa, Artificial Sequence
  Description of Artificial Sequence: Synthetic peptide
KETINEEAAEW

SEQ ID NO: 5747 - protein, 9 aa, Artificial Sequence
  Description of Artificial Sequence: Synthetic peptide
AELVVTTYW

SEQ ID NO: 5748 - protein, 11 aa, Artificial Sequence
  Description of Artificial Sequence: Synthetic peptide
NEQELLALDTW

SEQ ID NO: 5749 - protein, 10 aa, Artificial Sequence
  Description of Artificial Sequence: Synthetic peptide
GEAKLVITTY

SEQ ID NO: 5750 - protein, 11 aa, Artificial Sequence
  Description of Artificial Sequence: Synthetic peptide
SEAGDNRQGTI

SEQ ID NO: 5751 - protein, 11 aa, Artificial Sequence
  Description of Artificial Sequence: Synthetic peptide
LEVNIVTDSQY

SEQ ID NO: 5752 - protein, 10 aa, Artificial Sequence
  Description of Artificial Sequence: Synthetic peptide
SESEIVSQII

SEQ ID NO: 5753 - protein, 9 aa, Artificial Sequence
  Description of Artificial Sequence: Synthetic peptide
SEWILSNHL

SEQ ID NO: 5754 - protein, 9 aa, Artificial Sequence
  Description of Artificial Sequence: Synthetic peptide
AEQLWVTVY

SEQ ID NO: 5755 - protein, 9 aa, Artificial Sequence
  Description of Artificial Sequence: Synthetic peptide
SDSAIRNAL

SEQ ID NO: 5756 - protein, 10 aa, Artificial Sequence
  Description of Artificial Sequence: Synthetic peptide
EDVIIRSDNF

SEQ ID NO: 5757 - protein, 10 aa, Artificial Sequence
  Description of Artificial Sequence: Synthetic peptide
GDPEIVMHTF

SEQ ID NO: 5758 - protein, 9 aa, Artificial Sequence
  Description of Artificial Sequence: Synthetic peptide
ITKGLGISY

SEQ ID NO: 5759 - protein, 9 aa, Artificial Sequence
  Description of Artificial Sequence: Synthetic peptide
ITKALGISY

SEQ ID NO: 5760 - protein, 9 aa, Artificial Sequence
  Description of Artificial Sequence: Synthetic peptide
HIVSPSCEY

SEQ ID NO: 5761 - protein, 9 aa, Artificial Sequence
  Description of Artificial Sequence: Synthetic peptide
LSKQPTSQL

SEQ ID NO: 5762 - protein, 9 aa, Artificial Sequence
  Description of Artificial Sequence: Synthetic peptide
ITMGPGKVY

SEQ ID NO: 5763 - protein, 10 aa, Artificial Sequence
  Description of Artificial Sequence: Synthetic peptide
ILKEPVHGVY

SEQ ID NO: 5764 - protein, 9 aa, Artificial Sequence
  Description of Artificial Sequence: Synthetic peptide
ITMGPGRVY

SEQ ID NO: 5765 - protein, 9 aa, Artificial Sequence
  Description of Artificial Sequence: Synthetic peptide
RAVGIGAVF

SEQ ID NO: 5766 - protein, 9 aa, Artificial Sequence
  Description of Artificial Sequence: Synthetic peptide
LQILGIVAL

SEQ ID NO: 5767 - protein, 8 aa, Artificial Sequence
  Description of Artificial Sequence: Synthetic peptide
HKAIGTVL

SEQ ID NO: 5768 - protein, 8 aa, Artificial Sequence
  Description of Artificial Sequence: Synthetic peptide
HQAAMQML

SEQ ID NO: 5769 - protein, 9 aa, Artificial Sequence
  Description of Artificial Sequence: Synthetic peptide
HQAISPRTL

SEQ ID NO: 5770 - protein, 8 aa, Artificial Sequence
  Description of Artificial Sequence: Synthetic peptide
AKTIIVQL

SEQ ID NO: 5771 - protein, 9 aa, Artificial Sequence
  Description of Artificial Sequence: Synthetic peptide
IKPVVSTQL

SEQ ID NO: 5772 - protein, 8 aa, Artificial Sequence
  Description of Artificial Sequence: Synthetic peptide
HKTIGTVL

SEQ ID NO: 5773 - protein, 9 aa, Artificial Sequence
  Description of Artificial Sequence: Synthetic peptide
RAIEAQQHL

SEQ ID NO: 5774 - protein, 9 aa, Artificial Sequence
  Description of Artificial Sequence: Synthetic peptide
SQVTSAPAI

SEQ ID NO: 5775 - protein, 8 aa, Artificial Sequence
  Description of Artificial Sequence: Synthetic peptide
SQTHQVSL

SEQ ID NO: 5776 - protein, 8 aa, Artificial Sequence
  Description of Artificial Sequence: Synthetic peptide
KQLQARVL

SEQ ID NO: 5777 - protein, 8 aa, Artificial Sequence
  Description of Artificial Sequence: Synthetic peptide
YETEVHNV

SEQ ID NO: 5778 - protein, 9 aa, Artificial Sequence
  Description of Artificial Sequence: Synthetic peptide
SESEIVSQI

SEQ ID NO: 5779 - protein, 8 aa, Artificial Sequence
  Description of Artificial Sequence: Synthetic peptide
YESTHPKI

SEQ ID NO: 5780 - protein, 9 aa, Artificial Sequence
  Description of Artificial Sequence: Synthetic peptide
SESELVNQI

SEQ ID NO: 5781 - protein, 9 aa, Artificial Sequence
  Description of Artificial Sequence: Synthetic peptide
SESAIRNAI

SEQ ID NO: 5782 - protein, 9 aa, Artificial Sequence
  Description of Artificial Sequence: Synthetic peptide
SESELVSQI

SEQ ID NO: 5783 - protein, 9 aa, Artificial Sequence
  Description of Artificial Sequence: Synthetic peptide
IEISGHKTI

SEQ ID NO: 5784 - protein, 9 aa, Artificial Sequence
  Description of Artificial Sequence: Synthetic peptide
GEYSAGERI

SEQ ID NO: 5785 - protein, 9 aa, Artificial Sequence
  Description of Artificial Sequence: Synthetic peptide
AEMEKEGKI

SEQ ID NO: 5786 - protein, 8 aa, Artificial Sequence
  Description of Artificial Sequence: Synthetic peptide
SEIVSQII

SEQ ID NO: 5787 - protein, 9 aa, Artificial Sequence
  Description of Artificial Sequence: Synthetic peptide
TEMEKEGKI

SEQ ID NO: 5788 - protein, 9 aa, Artificial Sequence
  Description of Artificial Sequence: Synthetic peptide
NETVDIHCI

SEQ ID NO: 5789 - protein, 9 aa, Artificial Sequence
  Description of Artificial Sequence: Synthetic peptide
GEVGFPVKP

SEQ ID NO: 5790 - protein, 9 aa, Artificial Sequence
  Description of Artificial Sequence: Synthetic peptide
GECKNVSTV

SEQ ID NO: 5791 - protein, 9 aa, Artificial Sequence
  Description of Artificial Sequence: Synthetic peptide
AEWDRVHPV

SEQ ID NO: 5792 - protein, 10 aa, Artificial Sequence
  Description of Artificial Sequence: Synthetic peptide
AEEEVVIRSV

SEQ ID NO: 5793 - protein, 10 aa, Artificial Sequence
  Description of Artificial Sequence: Synthetic peptide
CEYQAGHNKV

SEQ ID NO: 5794 - protein, 8 aa, Artificial Sequence
  Description of Artificial Sequence: Synthetic peptide
AENLWVTV

SEQ ID NO: 5795 - protein, 8 aa, Artificial Sequence
  Description of Artificial Sequence: Synthetic peptide
TENLWVTV

SEQ ID NO: 5796 - protein, 9 aa, Artificial Sequence
  Description of Artificial Sequence: Synthetic peptide
KEQFNNNTI

SEQ ID NO: 5797 - protein, 10 aa, Artificial Sequence
  Description of Artificial Sequence: Synthetic peptide
EELKSLFNTV

SEQ ID NO: 5798 - protein, 8 aa, Artificial Sequence
  Description of Artificial Sequence: Synthetic peptide
YESTHPRI

SEQ ID NO: 5799 - protein, 8 aa, Artificial Sequence
  Description of Artificial Sequence: Synthetic peptide
AEQLWVTV

SEQ ID NO: 5800 - protein, 9 aa, Artificial Sequence
  Description of Artificial Sequence: Synthetic peptide
GEISALVEM

SEQ ID NO: 5801 - protein, 10 aa, Artificial Sequence
  Description of Artificial Sequence: Synthetic peptide
GEYSAGERII

SEQ ID NO: 5802 - protein, 10 aa, Artificial Sequence
  Description of Artificial Sequence: Synthetic peptide
EELKSLFNTI

SEQ ID NO: 5803 - protein, 9 aa, Artificial Sequence
  Description of Artificial Sequence: Synthetic peptide
LEDQQLLGI

SEQ ID NO: 5804 - protein, 10 aa, Artificial Sequence
  Description of Artificial Sequence: Synthetic peptide
GEIIGDIRQA

SEQ ID NO: 5805 - protein, 10 aa, Artificial Sequence
  Description of Artificial Sequence: Synthetic peptide
REIDNYTSLI

SEQ ID NO: 5806 - protein, 8 aa, Artificial Sequence
  Description of Artificial Sequence: Synthetic peptide
YESPHPRI

SEQ ID NO: 5807 - protein, 9 aa, Artificial Sequence
  Description of Artificial Sequence: Synthetic peptide
REINNYTSL

SEQ ID NO: 5808 - protein, 8 aa, Artificial Sequence
  Description of Artificial Sequence: Synthetic peptide
EEVVIRSV

SEQ ID NO: 5809 - protein, 9 aa, Artificial Sequence
  Description of Artificial Sequence: Synthetic peptide
REIDNYTSL

SEQ ID NO: 5810 - protein, 9 aa, Artificial Sequence
  Description of Artificial Sequence: Synthetic peptide
SEGEISALV

SEQ ID NO: 5811 - protein, 8 aa, Artificial Sequence
  Description of Artificial Sequence: Synthetic peptide
SEAGATRI

SEQ ID NO: 5812 - protein, 11 aa, Artificial Sequence
  Description of Artificial Sequence: Synthetic peptide
AELELAENREI

SEQ ID NO: 5813 - protein, 8 aa, Artificial Sequence
  Description of Artificial Sequence: Synthetic peptide
SELVSQII

SEQ ID NO: 5814 - protein, 9 aa, Artificial Sequence
  Description of Artificial Sequence: Synthetic peptide
TELEKEGKI

SEQ ID NO: 5815 - protein, 8 aa, Artificial Sequence
  Description of Artificial Sequence: Synthetic peptide
QEVVLVNV

SEQ ID NO: 5816 - protein, 9 aa, Artificial Sequence
  Description of Artificial Sequence: Synthetic peptide
YETEVHNVW

SEQ ID NO: 5817 - protein, 9 aa, Artificial Sequence
  Description of Artificial Sequence: Synthetic peptide
GELDRWEKI

SEQ ID NO: 5818 - protein, 9 aa, Artificial Sequence
  Description of Artificial Sequence: Synthetic peptide
EEEVVIRSV

SEQ ID NO: 5819 - protein, 9 aa, Artificial Sequence
  Description of Artificial Sequence: Synthetic peptide
QEVGKAMYA

SEQ ID NO: 5820 - protein, 9 aa, Artificial Sequence
  Description of Artificial Sequence: Synthetic peptide
IEIKDTKEA

SEQ ID NO: 5821 - protein, 9 aa, Artificial Sequence
  Description of Artificial Sequence: Synthetic peptide
GEVGFPVKP

SEQ ID NO: 5822 - protein, 10 aa, Artificial Sequence
  Description of Artificial Sequence: Synthetic peptide
GEIIGDIRQA

SEQ ID NO: 5823 - protein, 9 aa, Artificial Sequence
  Description of Artificial Sequence: Synthetic peptide
IEVKDTKEA

SEQ ID NO: 5824 - protein, 9 aa, Artificial Sequence
  Description of Artificial Sequence: Synthetic peptide
AEWDRIHPA

SEQ ID NO: 5825 - protein, 9 aa, Artificial Sequence
  Description of Artificial Sequence: Synthetic peptide
LEKEPIVGA

SEQ ID NO: 5826 - protein, 9 aa, Artificial Sequence
  Description of Artificial Sequence: Synthetic peptide
IEVRDTKEA

SEQ ID NO: 5827 - protein, 11 aa, Artificial Sequence
  Description of Artificial Sequence: Synthetic peptide
AEAMSQVTNSA

SEQ ID NO: 5828 - protein, 9 aa, Artificial Sequence
  Description of Artificial Sequence: Synthetic peptide
AETFYVDGA

SEQ ID NO: 5829 - protein, 9 aa, Artificial Sequence
  Description of Artificial Sequence: Synthetic peptide
RVIEVVQGA

SEQ ID NO: 5830 - protein, 10 aa, Artificial Sequence
  Description of Artificial Sequence: Synthetic peptide
REFSSEQTRA

SEQ ID NO: 5831 - protein, 9 aa, Artificial Sequence
  Description of Artificial Sequence: Synthetic peptide
EEVGFPVTP

SEQ ID NO: 5832 - protein, 10 aa, Artificial Sequence
  Description of Artificial Sequence: Synthetic peptide
AEAMSQVTSA

SEQ ID NO: 5833 - protein, 10 aa, Artificial Sequence
  Description of Artificial Sequence: Synthetic peptide
SEVHIPLGEA

SEQ ID NO: 5834 - protein, 11 aa, Artificial Sequence
  Description of Artificial Sequence: Synthetic peptide
AEPAADRVGAA

SEQ ID NO: 5835 - protein, 10 aa, Artificial Sequence
  Description of Artificial Sequence: Synthetic peptide
TEIVPLTAEA

SEQ ID NO: 5836 - protein, 9 aa, Artificial Sequence
  Description of Artificial Sequence: Synthetic peptide
RETETHPDA

SEQ ID NO: 5837 - protein, 10 aa, Artificial Sequence
  Description of Artificial Sequence: Synthetic peptide
GEIIGDIRRA

SEQ ID NO: 5838 - protein, 9 aa, Artificial Sequence
  Description of Artificial Sequence: Synthetic peptide
QIIGDIRQA

SEQ ID NO: 5839 - protein, 9 aa, Artificial Sequence
  Description of Artificial Sequence: Synthetic peptide
QEVGKAMYA

SEQ ID NO: 5840 - protein, 8 aa, Artificial Sequence
  Description of Artificial Sequence: Synthetic peptide
TEIVPLTA

SEQ ID NO: 5841 - protein, 10 aa, Artificial Sequence
  Description of Artificial Sequence: Synthetic peptide
TEVVPLTKEA

SEQ ID NO: 5842 - protein, 9 aa, Artificial Sequence
  Description of Artificial Sequence: Synthetic peptide
TETLLVQNA

SEQ ID NO: 5843 - protein, 9 aa, Artificial Sequence
  Description of Artificial Sequence: Synthetic peptide
IVSQIIEQL

SEQ ID NO: 5844 - protein, 9 aa, Artificial Sequence
  Description of Artificial Sequence: Synthetic peptide
AVFLGFLGA

SEQ ID NO: 5845 - protein, 9 aa, Artificial Sequence
  Description of Artificial Sequence: Synthetic peptide
RVIEVLQRV

SEQ ID NO: 5846 - protein, 9 aa, Artificial Sequence
  Description of Artificial Sequence: Synthetic peptide
LVSQIIEQL

SEQ ID NO: 5847 - protein, 11 aa, Artificial Sequence
  Description of Artificial Sequence: Synthetic peptide
TQVDPDLADQL

SEQ ID NO: 5848 - protein, 9 aa, Artificial Sequence
  Description of Artificial Sequence: Synthetic peptide
RVIETIQRA

SEQ ID NO: 5849 - protein, 9 aa, Artificial Sequence
  Description of Artificial Sequence: Synthetic peptide
GEISALVEM

SEQ ID NO: 5850 - protein, 10 aa, Artificial Sequence
  Description of Artificial Sequence: Synthetic peptide
AETFYVDGAA

SEQ ID NO: 5851 - protein, 9 aa, Artificial Sequence
  Description of Artificial Sequence: Synthetic peptide
ATLEEMMTA

SEQ ID NO: 5852 - protein, 9 aa, Artificial Sequence
  Description of Artificial Sequence: Synthetic peptide
EIIGDIRQA

SEQ ID NO: 5853 - protein, 9 aa, Artificial Sequence
  Description of Artificial Sequence: Synthetic peptide
AMFLGFLGA

SEQ ID NO: 5854 - protein, 10 aa, Artificial Sequence
  Description of Artificial Sequence: Synthetic peptide
AVFLGFLGAA

SEQ ID NO: 5855 - protein, 9 aa, Artificial Sequence
  Description of Artificial Sequence: Synthetic peptide
ASVTLTVQA

SEQ ID NO: 5856 - protein, 9 aa, Artificial Sequence
  Description of Artificial Sequence: Synthetic peptide
GENTSLLHP

SEQ ID NO: 5857 - protein, 10 aa, Artificial Sequence
  Description of Artificial Sequence: Synthetic peptide
AEPAADRVGA

SEQ ID NO: 5858 - protein, 10 aa, Artificial Sequence
  Description of Artificial Sequence: Synthetic peptide
REQAEHLKTA

SEQ ID NO: 5859 - protein, 9 aa, Artificial Sequence
  Description of Artificial Sequence: Synthetic peptide
ASMTLTVQA

SEQ ID NO: 5860 - protein, 11 aa, Artificial Sequence
  Description of Artificial Sequence: Synthetic peptide
TQVDPELADQL

SEQ ID NO: 5861 - protein, 10 aa, Artificial Sequence
  Description of Artificial Sequence: Synthetic peptide
GQIIGDIRQA

SEQ ID NO: 5862 - protein, 9 aa, Artificial Sequence
  Description of Artificial Sequence: Synthetic peptide
EEVGFPVRP

SEQ ID NO: 5863 - protein, 9 aa, Artificial Sequence
  Description of Artificial Sequence: Synthetic peptide
AVAEGTDRV

SEQ ID NO: 5864 - protein, 9 aa, Artificial Sequence
  Description of Artificial Sequence: Synthetic peptide
ALFLGFLGA

SEQ ID NO: 5865 - protein, 11 aa, Artificial Sequence
  Description of Artificial Sequence: Synthetic peptide
RAPPDSQIDQA

SEQ ID NO: 5866 - protein, 8 aa, Artificial Sequence
  Description of Artificial Sequence: Synthetic peptide
TAFTIPSI

SEQ ID NO: 5867 - protein, 8 aa, Artificial Sequence
  Description of Artificial Sequence: Synthetic peptide
TAFTIPSV

SEQ ID NO: 5868 - protein, 9 aa, Artificial Sequence
  Description of Artificial Sequence: Synthetic peptide
FPISPIETV

SEQ ID NO: 5869 - protein, 9 aa, Artificial Sequence
  Description of Artificial Sequence: Synthetic peptide
DAKAYETEV

SEQ ID NO: 5870 - protein, 9 aa, Artificial Sequence
  Description of Artificial Sequence: Synthetic peptide
DAKAYDTEV

SEQ ID NO: 5871 - protein, 9 aa, Artificial Sequence
  Description of Artificial Sequence: Synthetic peptide
YPLTSLRSL

SEQ ID NO: 5872 - protein, 10 aa, Artificial Sequence
  Description of Artificial Sequence: Synthetic peptide
IPYNPQSQGV

SEQ ID NO: 5873 - protein, 9 aa, Artificial Sequence
  Description of Artificial Sequence: Synthetic peptide
YAPPIAGQI

SEQ ID NO: 5874 - protein, 9 aa, Artificial Sequence
  Description of Artificial Sequence: Synthetic peptide
LPPVVAKEI

SEQ ID NO: 5875 - protein, 8 aa, Artificial Sequence
  Description of Artificial Sequence: Synthetic peptide
APPIAGQI

SEQ ID NO: 5876 - protein, 9 aa, Artificial Sequence
  Description of Artificial Sequence: Synthetic peptide
LPPIVAKEI

SEQ ID NO: 5877 - protein, 8 aa, Artificial Sequence
  Description of Artificial Sequence: Synthetic peptide
DSWTVNDI

SEQ ID NO: 5878 - protein, 8 aa, Artificial Sequence
  Description of Artificial Sequence: Synthetic peptide
NPYNTPVF

SEQ ID NO: 5879 - protein, 9 aa, Artificial Sequence
  Description of Artificial Sequence: Synthetic peptide
YAPPIGGQI

SEQ ID NO: 5880 - protein, 10 aa, Artificial Sequence
  Description of Artificial Sequence: Synthetic peptide
IPLGEAKLVI

SEQ ID NO: 5881 - protein, 8 aa, Artificial Sequence
  Description of Artificial Sequence: Synthetic peptide
VPVEPEKI

SEQ ID NO: 5882 - protein, 9 aa, Artificial Sequence
  Description of Artificial Sequence: Synthetic peptide
IPLGDARLV

SEQ ID NO: 5883 - protein, 8 aa, Artificial Sequence
  Description of Artificial Sequence: Synthetic peptide
VAIVALVV

SEQ ID NO: 5884 - protein, 9 aa, Artificial Sequence
  Description of Artificial Sequence: Synthetic peptide
YAPPISGQI

SEQ ID NO: 5885 - protein, 8 aa, Artificial Sequence
  Description of Artificial Sequence: Synthetic peptide
VPVEPDKI

SEQ ID NO: 5886 - protein, 8 aa, Artificial Sequence
  Description of Artificial Sequence: Synthetic peptide
ISFSFPQI

SEQ ID NO: 5887 - protein, 8 aa, Artificial Sequence
  Description of Artificial Sequence: Synthetic peptide
VALVVAAI

SEQ ID NO: 5888 - protein, 9 aa, Artificial Sequence
  Description of Artificial Sequence: Synthetic peptide
YPLTALKSL

SEQ ID NO: 5889 - protein, 9 aa, Artificial Sequence
  Description of Artificial Sequence: Synthetic peptide
VGFPVTPQV

SEQ ID NO: 5890 - protein, 10 aa, Artificial Sequence
  Description of Artificial Sequence: Synthetic peptide
IPLGEASLVI

SEQ ID NO: 5891 - protein, 9 aa, Artificial Sequence
  Description of Artificial Sequence: Synthetic peptide
NPPIPVGEI

SEQ ID NO: 5892 - protein, 9 aa, Artificial Sequence
  Description of Artificial Sequence: Synthetic peptide
IPLGEAKLV

SEQ ID NO: 5893 - protein, 9 aa, Artificial Sequence
  Description of Artificial Sequence: Synthetic peptide
LPLPPIERL

SEQ ID NO: 5894 - protein, 11 aa, Artificial Sequence
  Description of Artificial Sequence: Synthetic peptide
IPYNPQSQGVV

SEQ ID NO: 5895 - protein, 8 aa, Artificial Sequence
  Description of Artificial Sequence: Synthetic peptide
VPVEPDKV

SEQ ID NO: 5896 - protein, 9 aa, Artificial Sequence
  Description of Artificial Sequence: Synthetic peptide
IPLGEASLV

SEQ ID NO: 5897 - protein, 9 aa, Artificial Sequence
  Description of Artificial Sequence: Synthetic peptide
FPISPIETV

SEQ ID NO: 5898 - protein, 9 aa, Artificial Sequence
  Description of Artificial Sequence: Synthetic peptide
HPVHAGPIA

SEQ ID NO: 5899 - protein, 9 aa, Artificial Sequence
  Description of Artificial Sequence: Synthetic peptide
HPAQAGPIA

SEQ ID NO: 5900 - protein, 9 aa, Artificial Sequence
  Description of Artificial Sequence: Synthetic peptide
EAMSQVTSA

SEQ ID NO: 5901 - protein, 11 aa, Artificial Sequence
  Description of Artificial Sequence: Synthetic peptide
VPVEPDKIEEA

SEQ ID NO: 5902 - protein, 11 aa, Artificial Sequence
  Description of Artificial Sequence: Synthetic peptide
MPSLYILGIVA

SEQ ID NO: 5903 - protein, 11 aa, Artificial Sequence
  Description of Artificial Sequence: Synthetic peptide
VPVDPDQVEKA

SEQ ID NO: 5904 - protein, 10 aa, Artificial Sequence
  Description of Artificial Sequence: Synthetic peptide
EPLGVAPTTA

SEQ ID NO: 5905 - protein, 8 aa, Artificial Sequence
  Description of Artificial Sequence: Synthetic peptide
TAFTIPSV

SEQ ID NO: 5906 - protein, 11 aa, Artificial Sequence
  Description of Artificial Sequence: Synthetic peptide
VPVEPEKIEEA

SEQ ID NO: 5907 - protein, 9 aa, Artificial Sequence
  Description of Artificial Sequence: Synthetic peptide
EPIPIHYCA

SEQ ID NO: 5908 - protein, 9 aa, Artificial Sequence
  Description of Artificial Sequence: Synthetic peptide
YPLTALKSL

SEQ ID NO: 5909 - protein, 9 aa, Artificial Sequence
  Description of Artificial Sequence: Synthetic peptide
HVASGYIEA

SEQ ID NO: 5910 - protein, 9 aa, Artificial Sequence
  Description of Artificial Sequence: Synthetic peptide
YPLTSLRSL

SEQ ID NO: 5911 - protein, 9 aa, Artificial Sequence
  Description of Artificial Sequence: Synthetic peptide
NPYNTPIFA

SEQ ID NO: 5912 - protein, 9 aa, Artificial Sequence
  Description of Artificial Sequence: Synthetic peptide
EPIPIYYCA

SEQ ID NO: 5913 - protein, 9 aa, Artificial Sequence
  Description of Artificial Sequence: Synthetic peptide
HPGSQPKTA

SEQ ID NO: 5914 - protein, 10 aa, Artificial Sequence
  Description of Artificial Sequence: Synthetic peptide
EPLGVAPTKA

SEQ ID NO: 5915 - protein, 11 aa, Artificial Sequence
  Description of Artificial Sequence: Synthetic peptide
VPVEPDKVEEA

SEQ ID NO: 5916 - protein, 11 aa, Artificial Sequence
  Description of Artificial Sequence: Synthetic peptide
FALNPGLLETA

SEQ ID NO: 5917 - protein, 9 aa, Artificial Sequence
  Description of Artificial Sequence: Synthetic peptide
NPYNTPVFA

SEQ ID NO: 5918 - protein, 9 aa, Artificial Sequence
  Description of Artificial Sequence: Synthetic peptide
YPLASLKSL

SEQ ID NO: 5919 - protein, 8 aa, Artificial Sequence
  Description of Artificial Sequence: Synthetic peptide
TAFTIPSI

SEQ ID NO: 5920 - protein, 9 aa, Artificial Sequence
  Description of Artificial Sequence: Synthetic peptide
YPIVQNIQG

SEQ ID NO: 5921 - protein, 9 aa, Artificial Sequence
  Description of Artificial Sequence: Synthetic peptide
HPGSQPRTA

SEQ ID NO: 5922 - protein, 11 aa, Artificial Sequence
  Description of Artificial Sequence: Synthetic peptide
LPPVVAKEIVA

SEQ ID NO: 5923 - protein, 9 aa, Artificial Sequence
  Description of Artificial Sequence: Synthetic peptide
QPIPIVAIV

SEQ ID NO: 5924 - protein, 8 aa, Artificial Sequence
  Description of Artificial Sequence: Synthetic peptide
TAFTIPST

SEQ ID NO: 5925 - protein, 11 aa, Artificial Sequence
  Description of Artificial Sequence: Synthetic peptide
FPISPIETVPV

SEQ ID NO: 5926 - protein, 10 aa, Artificial Sequence
  Description of Artificial Sequence: Synthetic peptide
QPIPIVAIVA

SEQ ID NO: 5927 - protein, 9 aa, Artificial Sequence
  Description of Artificial Sequence: Synthetic peptide
YPLASLRSL

SEQ ID NO: 5928 - protein, 10 aa, Artificial Sequence
  Description of Artificial Sequence: Synthetic peptide
IPIEICGNKA

SEQ ID NO: 5929 - protein, 11 aa, Artificial Sequence
  Description of Artificial Sequence: Synthetic peptide
MLNTVGGHQAA

SEQ ID NO: 5930 - protein, 10 aa, Artificial Sequence
  Description of Artificial Sequence: Synthetic peptide
EAMSQVTNSA

SEQ ID NO: 5931 - protein, 10 aa, Artificial Sequence
  Description of Artificial Sequence: Synthetic peptide
HPVHAGPIAP

SEQ ID NO: 5932 - protein, 9 aa, Artificial Sequence
  Description of Artificial Sequence: Synthetic peptide
EATTTLFCA

SEQ ID NO: 5933 - protein, 9 aa, Artificial Sequence
  Description of Artificial Sequence: Synthetic peptide
FPVTPQVPL

SEQ ID NO: 5934 - protein, 9 aa, Artificial Sequence
  Description of Artificial Sequence: Synthetic peptide
EPLGVAPTT

SEQ ID NO: 5935 - protein, 9 aa, Artificial Sequence
  Description of Artificial Sequence: Synthetic peptide
EVVPLTKEA

SEQ ID NO: 5936 - protein, 9 aa, Artificial Sequence
  Description of Artificial Sequence: Synthetic peptide
YPIVQNMQG

SEQ ID NO: 5937 - protein, 8 aa, Artificial Sequence
  Description of Artificial Sequence: Synthetic peptide
IPIVAIVA

SEQ ID NO: 5938 - protein, 8 aa, Artificial Sequence
  Description of Artificial Sequence: Synthetic peptide
NAIAIAVA

SEQ ID NO: 5939 - protein, 9 aa, Artificial Sequence
  Description of Artificial Sequence: Synthetic peptide
SPEVIPMFA

SEQ ID NO: 5940 - protein, 9 aa, Artificial Sequence
  Description of Artificial Sequence: Synthetic peptide
QASLPKQPA

SEQ ID NO: 5941 - protein, 9 aa, Artificial Sequence
  Description of Artificial Sequence: Synthetic peptide
HPAQAGPIA

SEQ ID NO: 5942 - protein, 9 aa, Artificial Sequence
  Description of Artificial Sequence: Synthetic peptide
HPVHAGPIA

SEQ ID NO: 5943 - protein, 9 aa, Artificial Sequence
  Description of Artificial Sequence: Synthetic peptide
FPISPIETV

SEQ ID NO: 5944 - protein, 9 aa, Artificial Sequence
  Description of Artificial Sequence: Synthetic peptide
RPEPTAPPA

SEQ ID NO: 5945 - protein, 9 aa, Artificial Sequence
  Description of Artificial Sequence: Synthetic peptide
LPKQPASQP

SEQ ID NO: 5946 - protein, 9 aa, Artificial Sequence
  Description of Artificial Sequence: Synthetic peptide
HPAQAGPIA

SEQ ID NO: 5947 - protein, 9 aa, Artificial Sequence
  Description of Artificial Sequence: Synthetic peptide
FPISPIETV

SEQ ID NO: 5948 - protein, 9 aa, Artificial Sequence
  Description of Artificial Sequence: Synthetic peptide
HPVHAGPIA

SEQ ID NO: 5949 - protein, 10 aa, Artificial Sequence
  Description of Artificial Sequence: Synthetic peptide
EPLGVAPTTA

SEQ ID NO: 5950 - protein, 9 aa, Artificial Sequence
  Description of Artificial Sequence: Synthetic peptide
GPNFISTAV

SEQ ID NO: 5951 - protein, 11 aa, Artificial Sequence
  Description of Artificial Sequence: Synthetic peptide
VPVEPEKIEEA

SEQ ID NO: 5952 - protein, 11 aa, Artificial Sequence
  Description of Artificial Sequence: Synthetic peptide
VPVEPDKIEEA

SEQ ID NO: 5953 - protein, 10 aa, Artificial Sequence
  Description of Artificial Sequence: Synthetic peptide
IPAETGQETA

SEQ ID NO: 5954 - protein, 9 aa, Artificial Sequence
  Description of Artificial Sequence: Synthetic peptide
NPYNTPVFA

SEQ ID NO: 5955 - protein, 11 aa, Artificial Sequence
  Description of Artificial Sequence: Synthetic peptide
VPVDPDQVEKA

SEQ ID NO: 5956 - protein, 9 aa, Artificial Sequence
  Description of Artificial Sequence: Synthetic peptide
NPYNTPIFA

SEQ ID NO: 5957 - protein, 9 aa, Artificial Sequence
  Description of Artificial Sequence: Synthetic peptide
RPEPTAPPA

SEQ ID NO: 5958 - protein, 10 aa, Artificial Sequence
  Description of Artificial Sequence: Synthetic peptide
QPIPIVAIVA

SEQ ID NO: 5959 - protein, 11 aa, Artificial Sequence
  Description of Artificial Sequence: Synthetic peptide
GPNFISTAVKA

SEQ ID NO: 5960 - protein, 8 aa, Artificial Sequence
  Description of Artificial Sequence: Synthetic peptide
IPIVAIVA

SEQ ID NO: 5961 - protein, 10 aa, Artificial Sequence
  Description of Artificial Sequence: Synthetic peptide
EPLGVAPTKA

SEQ ID NO: 5962 - protein, 9 aa, Artificial Sequence
  Description of Artificial Sequence: Synthetic peptide
HPGSQPKTA

SEQ ID NO: 5963 - protein, 9 aa, Artificial Sequence
  Description of Artificial Sequence: Synthetic peptide
ASMALTVQA

SEQ ID NO: 5964 - protein, 10 aa, Artificial Sequence
  Description of Artificial Sequence: Synthetic peptide
IPYNPQSQGV

SEQ ID NO: 5965 - protein, 9 aa, Artificial Sequence
  Description of Artificial Sequence: Synthetic peptide
FPISPIETV

SEQ ID NO: 5966 - protein, 9 aa, Artificial Sequence
  Description of Artificial Sequence: Synthetic peptide
HPAQAGPIA

SEQ ID NO: 5967 - protein, 11 aa, Artificial Sequence
  Description of Artificial Sequence: Synthetic peptide
VPVDPDQVEKA

SEQ ID NO: 5968 - protein, 9 aa, Artificial Sequence
  Description of Artificial Sequence: Synthetic peptide
HPVHAGPIA

SEQ ID NO: 5969 - protein, 11 aa, Artificial Sequence
  Description of Artificial Sequence: Synthetic peptide
VPVEPDKIEEA

SEQ ID NO: 5970 - protein, 10 aa, Artificial Sequence
  Description of Artificial Sequence: Synthetic peptide
IPYNPQSQGV

SEQ ID NO: 5971 - protein, 10 aa, Artificial Sequence
  Description of Artificial Sequence: Synthetic peptide
APQDRQTHQA

SEQ ID NO: 5972 - protein, 9 aa, Artificial Sequence
  Description of Artificial Sequence: Synthetic peptide
GPNFISTAV

SEQ ID NO: 5973 - protein, 10 aa, Artificial Sequence
  Description of Artificial Sequence: Synthetic peptide
APAGFAILKC

SEQ ID NO: 5974 - protein, 11 aa, Artificial Sequence
  Description of Artificial Sequence: Synthetic peptide
VPVEPEKIEEA

SEQ ID NO: 5975 - protein, 11 aa, Artificial Sequence
  Description of Artificial Sequence: Synthetic peptide
VPVEPDKVEEA

SEQ ID NO: 5976 - protein, 9 aa, Artificial Sequence
  Description of Artificial Sequence: Synthetic peptide
SPTSRELQV

SEQ ID NO: 5977 - protein, 10 aa, Artificial Sequence
  Description of Artificial Sequence: Synthetic peptide
IPAETGQETA

SEQ ID NO: 5978 - protein, 11 aa, Artificial Sequence
  Description of Artificial Sequence: Synthetic peptide
GPNFISTAVKA

SEQ ID NO: 5979 - protein, 9 aa, Artificial Sequence
  Description of Artificial Sequence: Synthetic peptide
RPEPTAPPA

SEQ ID NO: 5980 - protein, 10 aa, Artificial Sequence
  Description of Artificial Sequence: Synthetic peptide
APPIAGQISC

SEQ ID NO: 5981 - protein, 10 aa, Artificial Sequence
  Description of Artificial Sequence: Synthetic peptide
SPEVIPMFSA

SEQ ID NO: 5982 - protein, 9 aa, Artificial Sequence
  Description of Artificial Sequence: Synthetic peptide
HPGSQPKTA

SEQ ID NO: 5983 - protein, 10 aa, Artificial Sequence
  Description of Artificial Sequence: Synthetic peptide
EPLGVAPTTA

SEQ ID NO: 5984 - protein, 10 aa, Artificial Sequence
  Description of Artificial Sequence: Synthetic peptide
IPIEICGNKA

SEQ ID NO: 5985 - protein, 10 aa, Artificial Sequence
  Description of Artificial Sequence: Synthetic peptide
QPIPIVAIVA

SEQ ID NO: 5986 - protein, 10 aa, Artificial Sequence
  Description of Artificial Sequence: Synthetic peptide
TPQDSQTHQV

SEQ ID NO: 5987 - protein, 9 aa, Artificial Sequence
  Description of Artificial Sequence: Synthetic peptide
PPIAGQISC

SEQ ID NO: 5988 - protein, 9 aa, Artificial Sequence
  Description of Artificial Sequence: Synthetic peptide
NPYNTPIFA

SEQ ID NO: 5989 - protein, 11 aa, Artificial Sequence
  Description of Artificial Sequence: Synthetic peptide
KAYDTEVHNVW

SEQ ID NO: 5990 - protein, 11 aa, Artificial Sequence
  Description of Artificial Sequence: Synthetic peptide
KAYETEVHNVW

SEQ ID NO: 5991 - protein, 9 aa, Artificial Sequence
  Description of Artificial Sequence: Synthetic peptide
ASLVIKTYW

SEQ ID NO: 5992 - protein, 9 aa, Artificial Sequence
  Description of Artificial Sequence: Synthetic peptide
STKLFNSTW

SEQ ID NO: 5993 - protein, 9 aa, Artificial Sequence
  Description of Artificial Sequence: Synthetic peptide
TTVPWNASW

SEQ ID NO: 5994 - protein, 9 aa, Artificial Sequence
  Description of Artificial Sequence: Synthetic peptide
STLQEQITW

SEQ ID NO: 5995 - protein, 10 aa, Artificial Sequence
  Description of Artificial Sequence: Synthetic peptide
RVIEIVQRTF

SEQ ID NO: 5996 - protein, 9 aa, Artificial Sequence
  Description of Artificial Sequence: Synthetic peptide
FSFPQITLW

SEQ ID NO: 5997 - protein, 9 aa, Artificial Sequence
  Description of Artificial Sequence: Synthetic peptide
TAVPWNASW

SEQ ID NO: 5998 - protein, 9 aa, Artificial Sequence
  Description of Artificial Sequence: Synthetic peptide
STLQEQIGW

SEQ ID NO: 5999 - protein, 9 aa, Artificial Sequence
  Description of Artificial Sequence: Synthetic peptide
VTKLTEDRW

SEQ ID NO: 6000 - protein, 10 aa, Artificial Sequence
  Description of Artificial Sequence: Synthetic peptide
ITMGPGRVYY

SEQ ID NO: 6001 - protein, 10 aa, Artificial Sequence
  Description of Artificial Sequence: Synthetic peptide
ITMGPGKVYY

SEQ ID NO: 6002 - protein, 11 aa, Artificial Sequence
  Description of Artificial Sequence: Synthetic peptide
ISFSFPQITLW

SEQ ID NO: 6003 - protein, 10 aa, Artificial Sequence
  Description of Artificial Sequence: Synthetic peptide
RVIEVLQRVY

SEQ ID NO: 6004 - protein, 11 aa, Artificial Sequence
  Description of Artificial Sequence: Synthetic peptide
SVLSGGQLDRW

SEQ ID NO: 6005 - protein, 9 aa, Artificial Sequence
  Description of Artificial Sequence: Synthetic peptide
RIKQIVNMW

SEQ ID NO: 6006 - protein, 11 aa, Artificial Sequence
  Description of Artificial Sequence: Synthetic peptide
SVLSGGELDRW

SEQ ID NO: 6007 - protein, 9 aa, Artificial Sequence
  Description of Artificial Sequence: Synthetic peptide
RIKQIINRW

SEQ ID NO: 6008 - protein, 9 aa, Artificial Sequence
  Description of Artificial Sequence: Synthetic peptide
ITKGLGISY

SEQ ID NO: 6009 - protein, 9 aa, Artificial Sequence
  Description of Artificial Sequence: Synthetic peptide
IVLPEKDTW

SEQ ID NO: 6010 - protein, 9 aa, Artificial Sequence
  Description of Artificial Sequence: Synthetic peptide
RIKQIINMW

SEQ ID NO: 6011 - protein, 11 aa, Artificial Sequence
  Description of Artificial Sequence: Synthetic peptide
TTSTLQEQITW

SEQ ID NO: 6012 - protein, 9 aa, Artificial Sequence
  Description of Artificial Sequence: Synthetic peptide
STKLFNSIW

SEQ ID NO: 6013 - protein, 9 aa, Artificial Sequence
  Description of Artificial Sequence: Synthetic peptide
FSVPLDREF

SEQ ID NO: 6014 - protein, 9 aa, Artificial Sequence
  Description of Artificial Sequence: Synthetic peptide
ITKALGISY

SEQ ID NO: 6015 - protein, 9 aa, Artificial Sequence
  Description of Artificial Sequence: Synthetic peptide
ITTESIVIW

SEQ ID NO: 6016 - protein, 9 aa, Artificial Sequence
  Description of Artificial Sequence: Synthetic peptide
STQLFNSTW

SEQ ID NO: 6017 - protein, 11 aa, Artificial Sequence
  Description of Artificial Sequence: Synthetic peptide
TTSTLQEQIGW

SEQ ID NO: 6018 - protein, 11 aa, Artificial Sequence
  Description of Artificial Sequence: Synthetic peptide
VSFSFPQITLW

SEQ ID NO: 6019 - protein, 9 aa, Artificial Sequence
  Description of Artificial Sequence: Synthetic peptide
NSTWFNSTW

SEQ ID NO: 6020 - protein, 11 aa, Artificial Sequence
  Description of Artificial Sequence: Synthetic peptide
VSFNFPQVTLW

SEQ ID NO: 6021 - protein, 11 aa, Artificial Sequence
  Description of Artificial Sequence: Synthetic peptide
SVLSGGKLDTW

SEQ ID NO: 6022 - protein, 9 aa, Artificial Sequence
  Description of Artificial Sequence: Synthetic peptide
VAKLTEDRW

SEQ ID NO: 6023 - protein, 10 aa, Artificial Sequence
  Description of Artificial Sequence: Synthetic peptide
KIATESIVIW

SEQ ID NO: 6024 - protein, 11 aa, Artificial Sequence
  Description of Artificial Sequence: Synthetic peptide
LAFPQGEAREF

SEQ ID NO: 6025 - protein, 11 aa, Artificial Sequence
  Description of Artificial Sequence: Synthetic peptide
VVAGIIAIVVW

SEQ ID NO: 6026 - protein, 9 aa, Artificial Sequence
  Description of Artificial Sequence: Synthetic peptide
ITMGPGRVY

SEQ ID NO: 6027 - protein, 10 aa, Artificial Sequence
  Description of Artificial Sequence: Synthetic peptide
VTVYYGVPVW

SEQ ID NO: 6028 - protein, 9 aa, Artificial Sequence
  Description of Artificial Sequence: Synthetic peptide
AAILAIVVW

SEQ ID NO: 6029 - protein, 9 aa, Artificial Sequence
  Description of Artificial Sequence: Synthetic peptide
IVLPEKDSW

SEQ ID NO: 6030 - protein, 9 aa, Artificial Sequence
  Description of Artificial Sequence: Synthetic peptide
AAIIAIVVW

SEQ ID NO: 6031 - protein, 9 aa, Artificial Sequence
  Description of Artificial Sequence: Synthetic peptide
TTQLFNSTW

SEQ ID NO: 6032 - protein, 11 aa, Artificial Sequence
  Description of Artificial Sequence: Synthetic peptide
VVAAIIAIVVW

SEQ ID NO: 6033 - protein, 11 aa, Artificial Sequence
  Description of Artificial Sequence: Synthetic peptide
KSLFNTVATLY

SEQ ID NO: 6034 - protein, 10 aa, Artificial Sequence
  Description of Artificial Sequence: Synthetic peptide
RVIETIQRAF

SEQ ID NO: 6035 - protein, 10 aa, Artificial Sequence
  Description of Artificial Sequence: Synthetic peptide
QQRQDILDLW

SEQ ID NO: 6036 - protein, 9 aa, Artificial Sequence
  Description of Artificial Sequence: Synthetic peptide
KTAVQMAVF

SEQ ID NO: 6037 - protein, 11 aa, Artificial Sequence
  Description of Artificial Sequence: Synthetic peptide
KSIHIGPGRAF

SEQ ID NO: 6038 - protein, 10 aa, Artificial Sequence
  Description of Artificial Sequence: Synthetic peptide
TTAVPWNASW

SEQ ID NO: 6039 - protein, 9 aa, Artificial Sequence
  Description of Artificial Sequence: Synthetic peptide
RAVGIGALF

SEQ ID NO: 6040 - protein, 9 aa, Artificial Sequence
  Description of Artificial Sequence: Synthetic peptide
STLQEQITW

SEQ ID NO: 6041 - protein, 9 aa, Artificial Sequence
  Description of Artificial Sequence: Synthetic peptide
ISSAAENLW

SEQ ID NO: 6042 - protein, 9 aa, Artificial Sequence
  Description of Artificial Sequence: Synthetic peptide
STLQEQIGW

SEQ ID NO: 6043 - protein, 9 aa, Artificial Sequence
  Description of Artificial Sequence: Synthetic peptide
YSTQVDPEL

SEQ ID NO: 6044 - protein, 9 aa, Artificial Sequence
  Description of Artificial Sequence: Synthetic peptide
RSGPLVDGF

SEQ ID NO: 6045 - protein, 9 aa, Artificial Sequence
  Description of Artificial Sequence: Synthetic peptide
KNNPVSQNY

SEQ ID NO: 6046 - protein, 9 aa, Artificial Sequence
  Description of Artificial Sequence: Synthetic peptide
RAVGIGAVF

SEQ ID NO: 6047 - protein, 11 aa, Artificial Sequence
  Description of Artificial Sequence: Synthetic peptide
KAYDTEVHNVW

SEQ ID NO: 6048 - protein, 10 aa, Artificial Sequence
  Description of Artificial Sequence: Synthetic peptide
TAATNADCAW

SEQ ID NO: 6049 - protein, 9 aa, Artificial Sequence
  Description of Artificial Sequence: Synthetic peptide
RAIEAQQHL

SEQ ID NO: 6050 - protein, 9 aa, Artificial Sequence
  Description of Artificial Sequence: Synthetic peptide
ISERILGTY

SEQ ID NO: 6051 - protein, 11 aa, Artificial Sequence
  Description of Artificial Sequence: Synthetic peptide
KTIHTDNGSNF

SEQ ID NO: 6052 - protein, 9 aa, Artificial Sequence
  Description of Artificial Sequence: Synthetic peptide
AATNAACAW

SEQ ID NO: 6053 - protein, 9 aa, Artificial Sequence
  Description of Artificial Sequence: Synthetic peptide
NSSQVSQNY

SEQ ID NO: 6054 - protein, 9 aa, Artificial Sequence
  Description of Artificial Sequence: Synthetic peptide
TTVPWNASW

SEQ ID NO: 6055 - protein, 9 aa, Artificial Sequence
  Description of Artificial Sequence: Synthetic peptide
TAVPWNASW

SEQ ID NO: 6056 - protein, 9 aa, Artificial Sequence
  Description of Artificial Sequence: Synthetic peptide
AAVDLSHFL

SEQ ID NO: 6057 - protein, 9 aa, Artificial Sequence
  Description of Artificial Sequence: Synthetic peptide
HSNQVSQNY

SEQ ID NO: 6058 - protein, 9 aa, Artificial Sequence
  Description of Artificial Sequence: Synthetic peptide
KAAVDLSHF

SEQ ID NO: 6059 - protein, 10 aa, Artificial Sequence
  Description of Artificial Sequence: Synthetic peptide
TAATNAACAW

SEQ ID NO: 6060 - protein, 9 aa, Artificial Sequence
  Description of Artificial Sequence: Synthetic peptide
RAVGIGALF

SEQ ID NO: 6061 - protein, 9 aa, Artificial Sequence
  Description of Artificial Sequence: Synthetic peptide
STQLFNSTW

SEQ ID NO: 6062 - protein, 9 aa, Artificial Sequence
  Description of Artificial Sequence: Synthetic peptide
KTAVQMAVF

SEQ ID NO: 6063 - protein, 9 aa, Artificial Sequence
  Description of Artificial Sequence: Synthetic peptide
AANNAACAW

SEQ ID NO: 6064 - protein, 10 aa, Artificial Sequence
  Description of Artificial Sequence: Synthetic peptide
RAIEAQQHLL

SEQ ID NO: 6065 - protein, 11 aa, Artificial Sequence
  Description of Artificial Sequence: Synthetic peptide
KAYETEVHNVW

SEQ ID NO: 6066 - protein, 9 aa, Artificial Sequence
  Description of Artificial Sequence: Synthetic peptide
GSGPLVNGF

SEQ ID NO: 6067 - protein, 10 aa, Artificial Sequence
  Description of Artificial Sequence: Synthetic peptide
ITMGPGKVYY

SEQ ID NO: 6068 - protein, 9 aa, Artificial Sequence
  Description of Artificial Sequence: Synthetic peptide
ITKGLGISY

SEQ ID NO: 6069 - protein, 8 aa, Artificial Sequence
  Description of Artificial Sequence: Synthetic peptide
GQGVSIEW

SEQ ID NO: 6070 - protein, 9 aa, Artificial Sequence
  Description of Artificial Sequence: Synthetic peptide
TTQLFNSTW

SEQ ID NO: 6071 - protein, 9 aa, Artificial Sequence
  Description of Artificial Sequence: Synthetic peptide
TINEEAAEW

SEQ ID NO: 6072 - protein, 9 aa, Artificial Sequence
  Description of Artificial Sequence: Synthetic peptide
LSKQPTSQL

SEQ ID NO: 6073 - protein, 9 aa, Artificial Sequence
  Description of Artificial Sequence: Synthetic peptide
YTTQVDPDL

SEQ ID NO: 6074 - protein, 9 aa, Artificial Sequence
  Description of Artificial Sequence: Synthetic peptide
KALGPAATL

SEQ ID NO: 6075 - protein, 8 aa, Artificial Sequence
  Description of Artificial Sequence: Synthetic peptide
NSPTSREL

SEQ ID NO: 6076 - protein, 9 aa, Artificial Sequence
  Description of Artificial Sequence: Synthetic peptide
HIPLGEASL

SEQ ID NO: 6077 - protein, 8 aa, Artificial Sequence
  Description of Artificial Sequence: Synthetic peptide
NSPTRREL

SEQ ID NO: 6078 - protein, 8 aa, Artificial Sequence
  Description of Artificial Sequence: Synthetic peptide
VGPVSRDL

SEQ ID NO: 6079 - protein, 8 aa, Artificial Sequence
  Description of Artificial Sequence: Synthetic peptide
DSPTSREL

SEQ ID NO: 6080 - protein, 9 aa, Artificial Sequence
  Description of Artificial Sequence: Synthetic peptide
YSPTSILDI

SEQ ID NO: 6081 - protein, 10 aa, Artificial Sequence
  Description of Artificial Sequence: Synthetic peptide
ITMGPGKVYY

SEQ ID NO: 6082 - protein, 9 aa, Artificial Sequence
  Description of Artificial Sequence: Synthetic peptide
ITKGLGISY

SEQ ID NO: 6083 - protein, 9 aa, Artificial Sequence
  Description of Artificial Sequence: Synthetic peptide
RAVGIGAVF

SEQ ID NO: 6084 - protein, 9 aa, Artificial Sequence
  Description of Artificial Sequence: Synthetic peptide
AAVDLSHFL

SEQ ID NO: 6085 - protein, 9 aa, Artificial Sequence
  Description of Artificial Sequence: Synthetic peptide
DARLVITTY

SEQ ID NO: 6086 - protein, 9 aa, Artificial Sequence
  Description of Artificial Sequence: Synthetic peptide
ITKGLGISY

SEQ ID NO: 6087 - protein, 8 aa, Artificial Sequence
  Description of Artificial Sequence: Synthetic peptide
AELVVTTY

SEQ ID NO: 6088 - protein, 9 aa, Artificial Sequence
  Description of Artificial Sequence: Synthetic peptide
ITKALGISY

SEQ ID NO: 6089 - protein, 9 aa, Artificial Sequence
  Description of Artificial Sequence: Synthetic peptide
DAELVVTTY

SEQ ID NO: 6090 - protein, 9 aa, Artificial Sequence
  Description of Artificial Sequence: Synthetic peptide
EAKLVITTY

SEQ ID NO: 6091 - protein, 9 aa, Artificial Sequence
  Description of Artificial Sequence: Synthetic peptide
LADQLIHVY

SEQ ID NO: 6092 - protein, 8 aa, Artificial Sequence
  Description of Artificial Sequence: Synthetic peptide
VLDVGDAY

SEQ ID NO: 6093 - protein, 9 aa, Artificial Sequence
  Description of Artificial Sequence: Synthetic peptide
ISERILGTY

SEQ ID NO: 6094 - protein, 9 aa, Artificial Sequence
  Description of Artificial Sequence: Synthetic peptide
YSTQVDPEL

SEQ ID NO: 6095 - protein, 9 aa, Artificial Sequence
  Description of Artificial Sequence: Synthetic peptide
AAVDLSHFL

SEQ ID NO: 6096 - protein, 9 aa, Artificial Sequence
  Description of Artificial Sequence: Synthetic peptide
LIVTRTLEL

SEQ ID NO: 6097 - protein, 9 aa, Artificial Sequence
  Description of Artificial Sequence: Synthetic peptide
YTTQVDPDL

SEQ ID NO: 6098 - protein, 9 aa, Artificial Sequence
  Description of Artificial Sequence: Synthetic peptide
RAIEAQQHL

SEQ ID NO: 6099 - protein, 9 aa, Artificial Sequence
  Description of Artificial Sequence: Synthetic peptide
LSKQPTSQL

SEQ ID NO: 6100 - protein, 9 aa, Artificial Sequence
  Description of Artificial Sequence: Synthetic peptide
YSTQVDPDL

SEQ ID NO: 6101 - protein, 9 aa, Artificial Sequence
  Description of Artificial Sequence: Synthetic peptide
YSTQVDPEL

SEQ ID NO: 6102 - protein, 9 aa, Artificial Sequence
  Description of Artificial Sequence: Synthetic peptide
AAVDLSHFL

SEQ ID NO: 6103 - protein, 9 aa, Artificial Sequence
  Description of Artificial Sequence: Synthetic peptide
YTTQVDPDL

SEQ ID NO: 6104 - protein, 9 aa, Artificial Sequence
  Description of Artificial Sequence: Synthetic peptide
LSKQPTSQL

SEQ ID NO: 6105 - protein, 9 aa, Artificial Sequence
  Description of Artificial Sequence: Synthetic peptide
LIVTRTLEL

SEQ ID NO: 6106 - protein, 9 aa, Artificial Sequence
  Description of Artificial Sequence: Synthetic peptide
RAIEAQQHL

SEQ ID NO: 6107 - protein, 9 aa, Artificial Sequence
  Description of Artificial Sequence: Synthetic peptide
YSTQVDPDL

SEQ ID NO: 6108 - protein, 8 aa, Artificial Sequence
  Description of Artificial Sequence: Synthetic peptide
HSRIGITL

SEQ ID NO: 6109 - protein, 9 aa, Artificial Sequence
  Description of Artificial Sequence: Synthetic peptide
ATDIQTKEL

SEQ ID NO: 6110 - protein, 9 aa, Artificial Sequence
  Description of Artificial Sequence: Synthetic peptide
SAEPVPLQL

SEQ ID NO: 6111 - protein, 9 aa, Artificial Sequence
  Description of Artificial Sequence: Synthetic peptide
LIVTRIVEL

SEQ ID NO: 6112 - protein, 9 aa, Artificial Sequence
  Description of Artificial Sequence: Synthetic peptide
QYDQILVEI

SEQ ID NO: 6113 - protein, 9 aa, Artificial Sequence
  Description of Artificial Sequence: Synthetic peptide
YYDPTKDLI

SEQ ID NO: 6114 - protein, 9 aa, Artificial Sequence
  Description of Artificial Sequence: Synthetic peptide
QYDQIPIEI

SEQ ID NO: 6115 - protein, 9 aa, Artificial Sequence
  Description of Artificial Sequence: Synthetic peptide
QYDQILIEI

SEQ ID NO: 6116 - protein, 9 aa, Artificial Sequence
  Description of Artificial Sequence: Synthetic peptide
HTDNGPNFI

SEQ ID NO: 6117 - protein, 8 aa, Artificial Sequence
  Description of Artificial Sequence: Synthetic peptide
HTDNGSNF

SEQ ID NO: 6118 - protein, 9 aa, Artificial Sequence
  Description of Artificial Sequence: Synthetic peptide
SAEPVPLQL

SEQ ID NO: 6119 - protein, 8 aa, Artificial Sequence
  Description of Artificial Sequence: Synthetic peptide
AVDLSHFL

SEQ ID NO: 6120 - protein, 9 aa, Artificial Sequence
  Description of Artificial Sequence: Synthetic peptide
VLDVGDAYF

SEQ ID NO: 6121 - protein, 9 aa, Artificial Sequence
  Description of Artificial Sequence: Synthetic peptide
IQDNSDIKV

SEQ ID NO: 6122 - protein, 9 aa, Artificial Sequence
  Description of Artificial Sequence: Synthetic peptide
QRPLVTIKI

SEQ ID NO: 6123 - protein, 9 aa, Artificial Sequence
  Description of Artificial Sequence: Synthetic peptide
SRAKWNNTL

SEQ ID NO: 6124 - protein, 9 aa, Artificial Sequence
  Description of Artificial Sequence: Synthetic peptide
QRPIVTIKI

SEQ ID NO: 6125 - protein, 9 aa, Artificial Sequence
  Description of Artificial Sequence: Synthetic peptide
FRNQVVRCF

SEQ ID NO: 6126 - protein, 9 aa, Artificial Sequence
  Description of Artificial Sequence: Synthetic peptide
VTNSGAIMM

SEQ ID NO: 6127 - protein, 9 aa, Artificial Sequence
  Description of Artificial Sequence: Synthetic peptide
YSTQVDPEL

SEQ ID NO: 6128 - protein, 9 aa, Artificial Sequence
  Description of Artificial Sequence: Synthetic peptide
SAVSLFNAI

SEQ ID NO: 6129 - protein, 9 aa, Artificial Sequence
  Description of Artificial Sequence: Synthetic peptide
AAVDLSHFL

SEQ ID NO: 6130 - protein, 9 aa, Artificial Sequence
  Description of Artificial Sequence: Synthetic peptide
DARLVITTY

SEQ ID NO: 6131 - protein, 9 aa, Artificial Sequence
  Description of Artificial Sequence: Synthetic peptide
HIVSPSCEY

SEQ ID NO: 6132 - protein, 9 aa, Artificial Sequence
  Description of Artificial Sequence: Synthetic peptide
EAKLVITTY

SEQ ID NO: 6133 - protein, 9 aa, Artificial Sequence
  Description of Artificial Sequence: Synthetic peptide
SAEPVPLQL

SEQ ID NO: 6134 - protein, 9 aa, Artificial Sequence
  Description of Artificial Sequence: Synthetic peptide
FLGAAGSTM

SEQ ID NO: 6135 - protein, 9 aa, Artificial Sequence
  Description of Artificial Sequence: Synthetic peptide
YTTQVDPDL

SEQ ID NO: 6136 - protein, 9 aa, Artificial Sequence
  Description of Artificial Sequence: Synthetic peptide
QVTNSGAIM

SEQ ID NO: 6137 - protein, 9 aa, Artificial Sequence
  Description of Artificial Sequence: Synthetic peptide
ALVEMGVEM

SEQ ID NO: 6138 - protein, 9 aa, Artificial Sequence
  Description of Artificial Sequence: Synthetic peptide
TVLDVGDAY

SEQ ID NO: 6139 - protein, 9 aa, Artificial Sequence
  Description of Artificial Sequence: Synthetic peptide
IVTDSQYAL

SEQ ID NO: 6140 - protein, 9 aa, Artificial Sequence
  Description of Artificial Sequence: Synthetic peptide
ALVEICTEM

SEQ ID NO: 6141 - protein, 10 aa, Artificial Sequence
  Description of Artificial Sequence: Synthetic peptide
IPIDNDTTSY

SEQ ID NO: 6142 - protein, 8 aa, Artificial Sequence
  Description of Artificial Sequence: Synthetic peptide
DQLIHVYY

SEQ ID NO: 6143 - protein, 8 aa, Artificial Sequence
  Description of Artificial Sequence: Synthetic peptide
AVDLSHFL

SEQ ID NO: 6144 - protein, 9 aa, Artificial Sequence
  Description of Artificial Sequence: Synthetic peptide
ATDIQTKEL

SEQ ID NO: 6145 - protein, 10 aa, Artificial Sequence
  Description of Artificial Sequence: Synthetic peptide
RADSPTSREL

SEQ ID NO: 6146 - protein, 8 aa, Artificial Sequence
  Description of Artificial Sequence: Synthetic peptide
ALDLSHFL

SEQ ID NO: 6147 - protein, 10 aa, Artificial Sequence
  Description of Artificial Sequence: Synthetic peptide
FSDSAIRNAL

SEQ ID NO: 6148 - protein, 10 aa, Artificial Sequence
  Description of Artificial Sequence: Synthetic peptide
AADTGHSNQV

SEQ ID NO: 6149 - protein, 9 aa, Artificial Sequence
  Description of Artificial Sequence: Synthetic peptide
TQDFWEVQL

SEQ ID NO: 6150 - protein, 10 aa, Artificial Sequence
  Description of Artificial Sequence: Synthetic peptide
GIDDPEKEVL

SEQ ID NO: 6151 - protein, 9 aa, Artificial Sequence
  Description of Artificial Sequence: Synthetic peptide
HTDNGPNFI

SEQ ID NO: 6152 - protein, 9 aa, Artificial Sequence
  Description of Artificial Sequence: Synthetic peptide
SAEPVPLQL

SEQ ID NO: 6153 - protein, 9 aa, Artificial Sequence
  Description of Artificial Sequence: Synthetic peptide
FTDNTKTII

SEQ ID NO: 6154 - protein, 9 aa, Artificial Sequence
  Description of Artificial Sequence: Synthetic peptide
GTDRVIEVL

SEQ ID NO: 6155 - protein, 8 aa, Artificial Sequence
  Description of Artificial Sequence: Synthetic peptide
SQTHQVSL

SEQ ID NO: 6156 - protein, 9 aa, Artificial Sequence
  Description of Artificial Sequence: Synthetic peptide
ALVEICTEL

SEQ ID NO: 6157 - protein, 10 aa, Artificial Sequence
  Description of Artificial Sequence: Synthetic peptide
VSFEPIPIYY

SEQ ID NO: 6158 - protein, 9 aa, Artificial Sequence
  Description of Artificial Sequence: Synthetic peptide
NAKTIIVQL

SEQ ID NO: 6159 - protein, 9 aa, Artificial Sequence
  Description of Artificial Sequence: Synthetic peptide
EASLVIKTY

SEQ ID NO: 6160 - protein, 10 aa, Artificial Sequence
  Description of Artificial Sequence: Synthetic peptide
VSFEPIPIHY

SEQ ID NO: 6161 - protein, 9 aa, Artificial Sequence
  Description of Artificial Sequence: Synthetic peptide
AAVDLSHFL

SEQ ID NO: 6162 - protein, 9 aa, Artificial Sequence
  Description of Artificial Sequence: Synthetic peptide
NTKTIIVQL

SEQ ID NO: 6163 - protein, 9 aa, Artificial Sequence
  Description of Artificial Sequence: Synthetic peptide
LSKQPTSQL

SEQ ID NO: 6164 - protein, 9 aa, Artificial Sequence
  Description of Artificial Sequence: Synthetic peptide
ITKGLGISY

SEQ ID NO: 6165 - protein, 9 aa, Artificial Sequence
  Description of Artificial Sequence: Synthetic peptide
FSVPLDREF

SEQ ID NO: 6166 - protein, 10 aa, Artificial Sequence
  Description of Artificial Sequence: Synthetic peptide
AFPQGKAREF

SEQ ID NO: 6167 - protein, 10 aa, Artificial Sequence
  Description of Artificial Sequence: Synthetic peptide
AFPQGEAREF

SEQ ID NO: 6168 - protein, 9 aa, Artificial Sequence
  Description of Artificial Sequence: Synthetic peptide
IYQEPFKNL

SEQ ID NO: 6169 - protein, 9 aa, Artificial Sequence
  Description of Artificial Sequence: Synthetic peptide
AFHHVAREL

SEQ ID NO: 6170 - protein, 9 aa, Artificial Sequence
  Description of Artificial Sequence: Synthetic peptide
FYKLDVVQM

SEQ ID NO: 6171 - protein, 9 aa, Artificial Sequence
  Description of Artificial Sequence: Synthetic peptide
LYNTVATLY

SEQ ID NO: 6172 - protein, 8 aa, Artificial Sequence
  Description of Artificial Sequence: Synthetic peptide
LYNTVATL

SEQ ID NO: 6173 - protein, 10 aa, Artificial Sequence
  Description of Artificial Sequence: Synthetic peptide
AFLQGKAREF

SEQ ID NO: 6174 - protein, 9 aa, Artificial Sequence
  Description of Artificial Sequence: Synthetic peptide
YYRDSRNPL

SEQ ID NO: 6175 - protein, 9 aa, Artificial Sequence
  Description of Artificial Sequence: Synthetic peptide
IFRPGGGDM

SEQ ID NO: 6176 - protein, 9 aa, Artificial Sequence
  Description of Artificial Sequence: Synthetic peptide
QFNNNTIVF

SEQ ID NO: 6177 - protein, 9 aa, Artificial Sequence
  Description of Artificial Sequence: Synthetic peptide
VFRPGGGNM

SEQ ID NO: 6178 - protein, 10 aa, Artificial Sequence
  Description of Artificial Sequence: Synthetic peptide
AFPQRKAREF

SEQ ID NO: 6179 - protein, 9 aa, Artificial Sequence
  Description of Artificial Sequence: Synthetic peptide
TYQIYQEPF

SEQ ID NO: 6180 - protein, 9 aa, Artificial Sequence
  Description of Artificial Sequence: Synthetic peptide
LYKNKTIVF

SEQ ID NO: 6181 - protein, 10 aa, Artificial Sequence
  Description of Artificial Sequence: Synthetic peptide
GFLGAAGSTM

SEQ ID NO: 6182 - protein, 9 aa, Artificial Sequence
  Description of Artificial Sequence: Synthetic peptide
VFIEYRKIL

SEQ ID NO: 6183 - protein, 8 aa, Artificial Sequence
  Description of Artificial Sequence: Synthetic peptide
VYHTQGYF

SEQ ID NO: 6184 - protein, 8 aa, Artificial Sequence
  Description of Artificial Sequence: Synthetic peptide
IYHTQGYF

SEQ ID NO: 6185 - protein, 9 aa, Artificial Sequence
  Description of Artificial Sequence: Synthetic peptide
FLQGKAREF

SEQ ID NO: 6186 - protein, 9 aa, Artificial Sequence
  Description of Artificial Sequence: Synthetic peptide
LFNTVATLY

SEQ ID NO: 6187 - protein, 9 aa, Artificial Sequence
  Description of Artificial Sequence: Synthetic peptide
IFRPGGGNM

SEQ ID NO: 6188 - protein, 9 aa, Artificial Sequence
  Description of Artificial Sequence: Synthetic peptide
LFNTIATLY

SEQ ID NO: 6189 - protein, 9 aa, Artificial Sequence
  Description of Artificial Sequence: Synthetic peptide
KYHSNWRAM

SEQ ID NO: 6190 - protein, 9 aa, Artificial Sequence
  Description of Artificial Sequence: Synthetic peptide
LYNTIAVLY

SEQ ID NO: 6191 - protein, 8 aa, Artificial Sequence
  Description of Artificial Sequence: Synthetic peptide
NYPIVQNL

SEQ ID NO: 6192 - protein, 9 aa, Artificial Sequence
  Description of Artificial Sequence: Synthetic peptide
VYYDPTKDL

SEQ ID NO: 6193 - protein, 8 aa, Artificial Sequence
  Description of Artificial Sequence: Synthetic peptide
LYNTVATL

SEQ ID NO: 6194 - protein, 9 aa, Artificial Sequence
  Description of Artificial Sequence: Synthetic peptide
IYQEPFKNL

SEQ ID NO: 6195 - protein, 10 aa, Artificial Sequence
  Description of Artificial Sequence: Synthetic peptide
GFLGAAGSTM

SEQ ID NO: 6196 - protein, 10 aa, Artificial Sequence
  Description of Artificial Sequence: Synthetic peptide
AFPQGEAREF

SEQ ID NO: 6197 - protein, 9 aa, Artificial Sequence
  Description of Artificial Sequence: Synthetic peptide
VFRPGGGNM

SEQ ID NO: 6198 - protein, 8 aa, Artificial Sequence
  Description of Artificial Sequence: Synthetic peptide
LYNTIAVL

SEQ ID NO: 6199 - protein, 9 aa, Artificial Sequence
  Description of Artificial Sequence: Synthetic peptide
TYQIYQEPF

SEQ ID NO: 6200 - protein, 9 aa, Artificial Sequence
  Description of Artificial Sequence: Synthetic peptide
FYKLDVVQM

SEQ ID NO: 6201 - protein, 9 aa, Artificial Sequence
  Description of Artificial Sequence: Synthetic peptide
LYNTVATLY

SEQ ID NO: 6202 - protein, 9 aa, Artificial Sequence
  Description of Artificial Sequence: Synthetic peptide
LYVGSDLEM

SEQ ID NO: 6203 - protein, 9 aa, Artificial Sequence
  Description of Artificial Sequence: Synthetic peptide
TSNITGLLL

SEQ ID NO: 6204 - protein, 9 aa, Artificial Sequence
  Description of Artificial Sequence: Synthetic peptide
TSLLHPVSL

SEQ ID NO: 6205 - protein, 9 aa, Artificial Sequence
  Description of Artificial Sequence: Synthetic peptide
SSNITGLLL

SEQ ID NO: 6206 - protein, 9 aa, Artificial Sequence
  Description of Artificial Sequence: Synthetic peptide
RVIEVLQRV

SEQ ID NO: 6207 - protein, 9 aa, Artificial Sequence
  Description of Artificial Sequence: Synthetic peptide
GAASVTLTV

SEQ ID NO: 6208 - protein, 9 aa, Artificial Sequence
  Description of Artificial Sequence: Synthetic peptide
ANSPTSREL

SEQ ID NO: 6209 - protein, 8 aa, Artificial Sequence
  Description of Artificial Sequence: Synthetic peptide
AGATRISF

SEQ ID NO: 6210 - protein, 9 aa, Artificial Sequence
  Description of Artificial Sequence: Synthetic peptide
FSVPLDREF

SEQ ID NO: 6211 - protein, 9 aa, Artificial Sequence
  Description of Artificial Sequence: Synthetic peptide
VSTGIRKVL

SEQ ID NO: 6212 - protein, 9 aa, Artificial Sequence
  Description of Artificial Sequence: Synthetic peptide
ITMGPGRVY

SEQ ID NO: 6213 - protein, 9 aa, Artificial Sequence
  Description of Artificial Sequence: Synthetic peptide
ITMGPGKVY

SEQ ID NO: 6214 - protein, 9 aa, Artificial Sequence
  Description of Artificial Sequence: Synthetic peptide
AAVDLSHFL

SEQ ID NO: 6215 - protein, 9 aa, Artificial Sequence
  Description of Artificial Sequence: Synthetic peptide
VARELHPEY

SEQ ID NO: 6216 - protein, 9 aa, Artificial Sequence
  Description of Artificial Sequence: Synthetic peptide
YSTQVDPEL

SEQ ID NO: 6217 - protein, 9 aa, Artificial Sequence
  Description of Artificial Sequence: Synthetic peptide
TSLLHPVSL

SEQ ID NO: 6218 - protein, 9 aa, Artificial Sequence
  Description of Artificial Sequence: Synthetic peptide
AAVDLSHFL

SEQ ID NO: 6219 - protein, 9 aa, Artificial Sequence
  Description of Artificial Sequence: Synthetic peptide
ANSPTSREL

SEQ ID NO: 6220 - protein, 10 aa, Artificial Sequence
  Description of Artificial Sequence: Synthetic peptide
IATDIQTKEL

SEQ ID NO: 6221 - protein, 9 aa, Artificial Sequence
  Description of Artificial Sequence: Synthetic peptide
EASLVIKTY

SEQ ID NO: 6222 - protein, 9 aa, Artificial Sequence
  Description of Artificial Sequence: Synthetic peptide
NAKTIIVQL

SEQ ID NO: 6223 - protein, 9 aa, Artificial Sequence
  Description of Artificial Sequence: Synthetic peptide
RAIEAQQHL

SEQ ID NO: 6224 - protein, 9 aa, Artificial Sequence
  Description of Artificial Sequence: Synthetic peptide
VARELHPEY

SEQ ID NO: 6225 - protein, 9 aa, Artificial Sequence
  Description of Artificial Sequence: Synthetic peptide
GAASVTLTV

SEQ ID NO: 6226 - protein, 9 aa, Artificial Sequence
  Description of Artificial Sequence: Synthetic peptide
VSTGIRKVL

SEQ ID NO: 6227 - protein, 9 aa, Artificial Sequence
  Description of Artificial Sequence: Synthetic peptide
YETEVHNVW

SEQ ID NO: 6228 - protein, 9 aa, Artificial Sequence
  Description of Artificial Sequence: Synthetic peptide
GAASVTLTV

SEQ ID NO: 6229 - protein, 10 aa, Artificial Sequence
  Description of Artificial Sequence: Synthetic peptide
SEAGATRISF

SEQ ID NO: 6230 - protein, 9 aa, Artificial Sequence
  Description of Artificial Sequence: Synthetic peptide
SAVSLFNAI

SEQ ID NO: 6231 - protein, 11 aa, Artificial Sequence
  Description of Artificial Sequence: Synthetic peptide
AEQASQEVKNW

SEQ ID NO: 6232 - protein, 9 aa, Artificial Sequence
  Description of Artificial Sequence: Synthetic peptide
AAVDLSHFL

SEQ ID NO: 6233 - protein, 10 aa, Artificial Sequence
  Description of Artificial Sequence: Synthetic peptide
VQMNNNNNSY

SEQ ID NO: 6234 - protein, 11 aa, Artificial Sequence
  Description of Artificial Sequence: Synthetic peptide
AEIQKQGQGQW

SEQ ID NO: 6235 - protein, 9 aa, Artificial Sequence
  Description of Artificial Sequence: Synthetic peptide
SESAIRNAI

SEQ ID NO: 6236 - protein, 9 aa, Artificial Sequence
  Description of Artificial Sequence: Synthetic peptide
AAVDLSHFL

SEQ ID NO: 6237 - protein, 9 aa, Artificial Sequence
  Description of Artificial Sequence: Synthetic peptide
LIVTRIVEL

SEQ ID NO: 6238 - protein, 9 aa, Artificial Sequence
  Description of Artificial Sequence: Synthetic peptide
LIVVRIVEL

SEQ ID NO: 6239 - protein, 9 aa, Artificial Sequence
  Description of Artificial Sequence: Synthetic peptide
SAEPVPLQL

SEQ ID NO: 6240 - protein, 10 aa, Artificial Sequence
  Description of Artificial Sequence: Synthetic peptide
RAVGIGAVFL

SEQ ID NO: 6241 - protein, 9 aa, Artificial Sequence
  Description of Artificial Sequence: Synthetic peptide
YSTQVDPEL

SEQ ID NO: 6242 - protein, 9 aa, Artificial Sequence
  Description of Artificial Sequence: Synthetic peptide
SLDPIPIHY

SEQ ID NO: 6243 - protein, 8 aa, Artificial Sequence
  Description of Artificial Sequence: Synthetic peptide
VLDVGDAY

SEQ ID NO: 6244 - protein, 9 aa, Artificial Sequence
  Description of Artificial Sequence: Synthetic peptide
SFDPIPIHY

SEQ ID NO: 6245 - protein, 10 aa, Artificial Sequence
  Description of Artificial Sequence: Synthetic peptide
VTVLDVGDAY

SEQ ID NO: 6246 - protein, 9 aa, Artificial Sequence
  Description of Artificial Sequence: Synthetic peptide
TFDPIPIHY

SEQ ID NO: 6247 - protein, 9 aa, Artificial Sequence
  Description of Artificial Sequence: Synthetic peptide
TSSLFNSTY

SEQ ID NO: 6248 - protein, 9 aa, Artificial Sequence
  Description of Artificial Sequence: Synthetic peptide
QTGWQALKY

SEQ ID NO: 6249 - protein, 9 aa, Artificial Sequence
  Description of Artificial Sequence: Synthetic peptide
VLAEAMSQV

SEQ ID NO: 6250 - protein, 9 aa, Artificial Sequence
  Description of Artificial Sequence: Synthetic peptide
VLAEAMSKV

SEQ ID NO: 6251 - protein, 9 aa, Artificial Sequence
  Description of Artificial Sequence: Synthetic peptide
ILAQIQPAI

SEQ ID NO: 6252 - protein, 9 aa, Artificial Sequence
  Description of Artificial Sequence: Synthetic peptide
ILKEPVHGV

SEQ ID NO: 6253 - protein, 9 aa, Artificial Sequence
  Description of Artificial Sequence: Synthetic peptide
SLFNTVATL

SEQ ID NO: 6254 - protein, 9 aa, Artificial Sequence
  Description of Artificial Sequence: Synthetic peptide
VLAEAMSQI

SEQ ID NO: 6255 - protein, 9 aa, Artificial Sequence
  Description of Artificial Sequence: Synthetic peptide
RLIEGLQGI

SEQ ID NO: 6256 - protein, 9 aa, Artificial Sequence
  Description of Artificial Sequence: Synthetic peptide
QMVHQPISA

SEQ ID NO: 6257 - protein, 10 aa, Artificial Sequence
  Description of Artificial Sequence: Synthetic peptide
KVVEVKPLGV

SEQ ID NO: 6258 - protein, 10 aa, Artificial Sequence
  Description of Artificial Sequence: Synthetic peptide
KVVEIKPLGV

SEQ ID NO: 6259 - protein, 9 aa, Artificial Sequence
  Description of Artificial Sequence: Synthetic peptide
QLTEAVQKI

SEQ ID NO: 6260 - protein, 9 aa, Artificial Sequence
  Description of Artificial Sequence: Synthetic peptide
GLADQLIHM

SEQ ID NO: 6261 - protein, 9 aa, Artificial Sequence
  Description of Artificial Sequence: Synthetic peptide
AVISIVNRV

SEQ ID NO: 6262 - protein, 9 aa, Artificial Sequence
  Description of Artificial Sequence: Synthetic peptide
AVLSIVNRV

SEQ ID NO: 6263 - protein, 9 aa, Artificial Sequence
  Description of Artificial Sequence: Synthetic peptide
QLTAVVQKI

SEQ ID NO: 6264 - protein, 9 aa, Artificial Sequence
  Description of Artificial Sequence: Synthetic peptide
ALTDIVPLT

SEQ ID NO: 6265 - protein, 9 aa, Artificial Sequence
  Description of Artificial Sequence: Synthetic peptide
SLFGNDHLL

SEQ ID NO: 6266 - protein, 9 aa, Artificial Sequence
  Description of Artificial Sequence: Synthetic peptide
LLDRIAIAV

SEQ ID NO: 6267 - protein, 10 aa, Artificial Sequence
  Description of Artificial Sequence: Synthetic peptide
KLVPVDPSEV

SEQ ID NO: 6268 - protein, 9 aa, Artificial Sequence
  Description of Artificial Sequence: Synthetic peptide
GLADHLIHM

SEQ ID NO: 6269 - protein, 10 aa, Artificial Sequence
  Description of Artificial Sequence: Synthetic peptide
KLVPVDPREV

SEQ ID NO: 6270 - protein, 9 aa, Artificial Sequence
  Description of Artificial Sequence: Synthetic peptide
IVTDSQYAL

SEQ ID NO: 6271 - protein, 9 aa, Artificial Sequence
  Description of Artificial Sequence: Synthetic peptide
VLAEAMSQV

SEQ ID NO: 6272 - protein, 9 aa, Artificial Sequence
  Description of Artificial Sequence: Synthetic peptide
VLAEAMSKV

SEQ ID NO: 6273 - protein, 9 aa, Artificial Sequence
  Description of Artificial Sequence: Synthetic peptide
ILKEPVHGV

SEQ ID NO: 6274 - protein, 9 aa, Artificial Sequence
  Description of Artificial Sequence: Synthetic peptide
VLAEAMSQI

SEQ ID NO: 6275 - protein, 9 aa, Artificial Sequence
  Description of Artificial Sequence: Synthetic peptide
AVISIVNRV

SEQ ID NO: 6276 - protein, 10 aa, Artificial Sequence
  Description of Artificial Sequence: Synthetic peptide
KVVEVKPLGV

SEQ ID NO: 6277 - protein, 9 aa, Artificial Sequence
  Description of Artificial Sequence: Synthetic peptide
RLIEGLQGI

SEQ ID NO: 6278 - protein, 10 aa, Artificial Sequence
  Description of Artificial Sequence: Synthetic peptide
KVVEIKPLGV

SEQ ID NO: 6279 - protein, 9 aa, Artificial Sequence
  Description of Artificial Sequence: Synthetic peptide
SLFNTVATL

SEQ ID NO: 6280 - protein, 9 aa, Artificial Sequence
  Description of Artificial Sequence: Synthetic peptide
TLNAWVKVV

SEQ ID NO: 6281 - protein, 10 aa, Artificial Sequence
  Description of Artificial Sequence: Synthetic peptide
YLKDQQLLGL

SEQ ID NO: 6282 - protein, 10 aa, Artificial Sequence
  Description of Artificial Sequence: Synthetic peptide
YLKDQQLLGI

SEQ ID NO: 6283 - protein, 10 aa, Artificial Sequence
  Description of Artificial Sequence: Synthetic peptide
YLRDQQLLGI

SEQ ID NO: 6284 - protein, 9 aa, Artificial Sequence
  Description of Artificial Sequence: Synthetic peptide
KIKPPLPSV

SEQ ID NO: 6285 - protein, 10 aa, Artificial Sequence
  Description of Artificial Sequence: Synthetic peptide
KLVPVDPREV

SEQ ID NO: 6286 - protein, 10 aa, Artificial Sequence
  Description of Artificial Sequence: Synthetic peptide
ALFWDDLRNL

SEQ ID NO: 6287 - protein, 10 aa, Artificial Sequence
  Description of Artificial Sequence: Synthetic peptide
SLFGSDPLST

SEQ ID NO: 6288 - protein, 9 aa, Artificial Sequence
  Description of Artificial Sequence: Synthetic peptide
QLTAVVQKI

SEQ ID NO: 6289 - protein, 9 aa, Artificial Sequence
  Description of Artificial Sequence: Synthetic peptide
ASITLTVQV

SEQ ID NO: 6290 - protein, 9 aa, Artificial Sequence
  Description of Artificial Sequence: Synthetic peptide
SLHNTVATL

SEQ ID NO: 6291 - protein, 9 aa, Artificial Sequence
  Description of Artificial Sequence: Synthetic peptide
ELKSLFNTV

SEQ ID NO: 6292 - protein, 11 aa, Artificial Sequence
  Description of Artificial Sequence: Synthetic peptide
FLKEKGGLEGL

SEQ ID NO: 6293 - protein, 9 aa, Artificial Sequence
  Description of Artificial Sequence: Synthetic peptide
GAASITLTV

SEQ ID NO: 6294 - protein, 9 aa, Artificial Sequence
  Description of Artificial Sequence: Synthetic peptide
ALNPGLLET

SEQ ID NO: 6295 - protein, 9 aa, Artificial Sequence
  Description of Artificial Sequence: Synthetic peptide
AVLSIVNRV

SEQ ID NO: 6296 - protein, 9 aa, Artificial Sequence
  Description of Artificial Sequence: Synthetic peptide
QLTEAVQKI

SEQ ID NO: 6297 - protein, 10 aa, Artificial Sequence
  Description of Artificial Sequence: Synthetic peptide
VLFLDGINKA

SEQ ID NO: 6298 - protein, 9 aa, Artificial Sequence
  Description of Artificial Sequence: Synthetic peptide
ILAQIQPAI

SEQ ID NO: 6299 - protein, 10 aa, Artificial Sequence
  Description of Artificial Sequence: Synthetic peptide
SLFDTIAIAV

SEQ ID NO: 6300 - protein, 9 aa, Artificial Sequence
  Description of Artificial Sequence: Synthetic peptide
NLTDNVKTI

SEQ ID NO: 6301 - protein, 10 aa, Artificial Sequence
  Description of Artificial Sequence: Synthetic peptide
KLVPVDPSEV

SEQ ID NO: 6302 - protein, 9 aa, Artificial Sequence
  Description of Artificial Sequence: Synthetic peptide
ALIRTLQQL

SEQ ID NO: 6303 - protein, 9 aa, Artificial Sequence
  Description of Artificial Sequence: Synthetic peptide
ELKKIIGQV

SEQ ID NO: 6304 - protein, 8 aa, Artificial Sequence
  Description of Artificial Sequence: Synthetic peptide
VLSIVNRV

SEQ ID NO: 6305 - protein, 9 aa, Artificial Sequence
  Description of Artificial Sequence: Synthetic peptide
EIIGNIRQA

SEQ ID NO: 6306 - protein, 9 aa, Artificial Sequence
  Description of Artificial Sequence: Synthetic peptide
VLAEAMSQT

SEQ ID NO: 6307 - protein, 10 aa, Artificial Sequence
  Description of Artificial Sequence: Synthetic peptide
TLSERILSNF

SEQ ID NO: 6308 - protein, 9 aa, Artificial Sequence
  Description of Artificial Sequence: Synthetic peptide
SLFNTIAVL

SEQ ID NO: 6309 - protein, 9 aa, Artificial Sequence
  Description of Artificial Sequence: Synthetic peptide
GLADHLIHM

SEQ ID NO: 6310 - protein, 9 aa, Artificial Sequence
  Description of Artificial Sequence: Synthetic peptide
KIKPPLPSI

SEQ ID NO: 6311 - protein, 10 aa, Artificial Sequence
  Description of Artificial Sequence: Synthetic peptide
HLRDQQLLGI

SEQ ID NO: 6312 - protein, 9 aa, Artificial Sequence
  Description of Artificial Sequence: Synthetic peptide
ALFLGFLGA

SEQ ID NO: 6313 - protein, 10 aa, Artificial Sequence
  Description of Artificial Sequence: Synthetic peptide
ALFLGFLGAA

SEQ ID NO: 6314 - protein, 9 aa, Artificial Sequence
  Description of Artificial Sequence: Synthetic peptide
ELRSLFNTV

SEQ ID NO: 6315 - protein, 10 aa, Artificial Sequence
  Description of Artificial Sequence: Synthetic peptide
KVVEIKPLGI

SEQ ID NO: 6316 - protein, 9 aa, Artificial Sequence
  Description of Artificial Sequence: Synthetic peptide
SITKWLWYI

SEQ ID NO: 6317 - protein, 9 aa, Artificial Sequence
  Description of Artificial Sequence: Synthetic peptide
SLFNTVATL

SEQ ID NO: 6318 - protein, 10 aa, Artificial Sequence
  Description of Artificial Sequence: Synthetic peptide
ALFWDDLRNL

SEQ ID NO: 6319 - protein, 9 aa, Artificial Sequence
  Description of Artificial Sequence: Synthetic peptide
TLNAWVKVV

SEQ ID NO: 6320 - protein, 9 aa, Artificial Sequence
  Description of Artificial Sequence: Synthetic peptide
AVISIVNRV

SEQ ID NO: 6321 - protein, 9 aa, Artificial Sequence
  Description of Artificial Sequence: Synthetic peptide
ALLRILQQL

SEQ ID NO: 6322 - protein, 9 aa, Artificial Sequence
  Description of Artificial Sequence: Synthetic peptide
AVLSIVNRV

SEQ ID NO: 6323 - protein, 9 aa, Artificial Sequence
  Description of Artificial Sequence: Synthetic peptide
SLFNTIAVL

SEQ ID NO: 6324 - protein, 9 aa, Artificial Sequence
  Description of Artificial Sequence: Synthetic peptide
ILKEPVHGV

SEQ ID NO: 6325 - protein, 9 aa, Artificial Sequence
  Description of Artificial Sequence: Synthetic peptide
ILAQIQPAI

SEQ ID NO: 6326 - protein, 9 aa, Artificial Sequence
  Description of Artificial Sequence: Synthetic peptide
ALIRTLQQL

SEQ ID NO: 6327 - protein, 9 aa, Artificial Sequence
  Description of Artificial Sequence: Synthetic peptide
RLIEGLQGI

SEQ ID NO: 6328 - protein, 9 aa, Artificial Sequence
  Description of Artificial Sequence: Synthetic peptide
IVNQIIEQL

SEQ ID NO: 6329 - protein, 9 aa, Artificial Sequence
  Description of Artificial Sequence: Synthetic peptide
NITNWLWYI

SEQ ID NO: 6330 - protein, 9 aa, Artificial Sequence
  Description of Artificial Sequence: Synthetic peptide
SLHNTVATL

SEQ ID NO: 6331 - protein, 9 aa, Artificial Sequence
  Description of Artificial Sequence: Synthetic peptide
GLADHLIHM

SEQ ID NO: 6332 - protein, 9 aa, Artificial Sequence
  Description of Artificial Sequence: Synthetic peptide
GITNWLWYI

SEQ ID NO: 6333 - protein, 9 aa, Artificial Sequence
  Description of Artificial Sequence: Synthetic peptide
GLADQLIHM

SEQ ID NO: 6334 - protein, 9 aa, Artificial Sequence
  Description of Artificial Sequence: Synthetic peptide
TLNAWVKVI

SEQ ID NO: 6335 - protein, 9 aa, Artificial Sequence
  Description of Artificial Sequence: Synthetic peptide
SLFGNDHLL

SEQ ID NO: 6336 - protein, 10 aa, Artificial Sequence
  Description of Artificial Sequence: Synthetic peptide
TLWQRPLVTI

SEQ ID NO: 6337 - protein, 9 aa, Artificial Sequence
  Description of Artificial Sequence: Synthetic peptide
RILELVQRI

SEQ ID NO: 6338 - protein, 9 aa, Artificial Sequence
  Description of Artificial Sequence: Synthetic peptide
GVLSIVKRV

SEQ ID NO: 6339 - protein, 9 aa, Artificial Sequence
  Description of Artificial Sequence: Synthetic peptide
LVNQIIEQL

SEQ ID NO: 6340 - protein, 10 aa, Artificial Sequence
  Description of Artificial Sequence: Synthetic peptide
SLFDTIAIAV

SEQ ID NO: 6341 - protein, 10 aa, Artificial Sequence
  Description of Artificial Sequence: Synthetic peptide
YLKDQQLLGL

SEQ ID NO: 6342 - protein, 9 aa, Artificial Sequence
  Description of Artificial Sequence: Synthetic peptide
KIKPPLPSV

SEQ ID NO: 6343 - protein, 9 aa, Artificial Sequence
  Description of Artificial Sequence: Synthetic peptide
YQQWWIWGV

SEQ ID NO: 6344 - protein, 10 aa, Artificial Sequence
  Description of Artificial Sequence: Synthetic peptide
SLVQYWGLEL

SEQ ID NO: 6345 - protein, 9 aa, Artificial Sequence
  Description of Artificial Sequence: Synthetic peptide
TLTVQVRQL

SEQ ID NO: 6346 - protein, 9 aa, Artificial Sequence
  Description of Artificial Sequence: Synthetic peptide
FQLPPIERL

SEQ ID NO: 6347 - protein, 9 aa, Artificial Sequence
  Description of Artificial Sequence: Synthetic peptide
HLEGKIILV

SEQ ID NO: 6348 - protein, 10 aa, Artificial Sequence
  Description of Artificial Sequence: Synthetic peptide
NLLDRIAIAV

SEQ ID NO: 6349 - protein, 10 aa, Artificial Sequence
  Description of Artificial Sequence: Synthetic peptide
TLWQRPLVSI

SEQ ID NO: 6350 - protein, 9 aa, Artificial Sequence
  Description of Artificial Sequence: Synthetic peptide
ALTDIVPLT

SEQ ID NO: 6351 - protein, 9 aa, Artificial Sequence
  Description of Artificial Sequence: Synthetic peptide
RIIEVIQGI

SEQ ID NO: 6352 - protein, 9 aa, Artificial Sequence
  Description of Artificial Sequence: Synthetic peptide
GQNQWTYQI

SEQ ID NO: 6353 - protein, 9 aa, Artificial Sequence
  Description of Artificial Sequence: Synthetic peptide
AVVDLSFFL

SEQ ID NO: 6354 - protein, 9 aa, Artificial Sequence
  Description of Artificial Sequence: Synthetic peptide
LVWEDLRSL

SEQ ID NO: 6355 - protein, 9 aa, Artificial Sequence
  Description of Artificial Sequence: Synthetic peptide
NYTDIIYNL

SEQ ID NO: 6356 - protein, 9 aa, Artificial Sequence
  Description of Artificial Sequence: Synthetic peptide
NYTDIIYTL

SEQ ID NO: 6357 - protein, 9 aa, Artificial Sequence
  Description of Artificial Sequence: Synthetic peptide
VLAEAMSQV

SEQ ID NO: 6358 - protein, 10 aa, Artificial Sequence
  Description of Artificial Sequence: Synthetic peptide
KVVEIKPLGV

SEQ ID NO: 6359 - protein, 10 aa, Artificial Sequence
  Description of Artificial Sequence: Synthetic peptide
TLWQRPLVNI

SEQ ID NO: 6360 - protein, 9 aa, Artificial Sequence
  Description of Artificial Sequence: Synthetic peptide
IIAIVVWTI

SEQ ID NO: 6361 - protein, 10 aa, Artificial Sequence
  Description of Artificial Sequence: Synthetic peptide
FLYASVDYRL

SEQ ID NO: 6362 - protein, 9 aa, Artificial Sequence
  Description of Artificial Sequence: Synthetic peptide
QLTAVVQKI

SEQ ID NO: 6363 - protein, 9 aa, Artificial Sequence
  Description of Artificial Sequence: Synthetic peptide
KIKPPLPSI

SEQ ID NO: 6364 - protein, 9 aa, Artificial Sequence
  Description of Artificial Sequence: Synthetic peptide
NVKTIIVHL

SEQ ID NO: 6365 - protein, 9 aa, Artificial Sequence
  Description of Artificial Sequence: Synthetic peptide
LLDRIAIAV

SEQ ID NO: 6366 - protein, 9 aa, Artificial Sequence
  Description of Artificial Sequence: Synthetic peptide
LLNTTAIVV

SEQ ID NO: 6367 - protein, 9 aa, Artificial Sequence
  Description of Artificial Sequence: Synthetic peptide
RILQRLLFV

SEQ ID NO: 6368 - protein, 9 aa, Artificial Sequence
  Description of Artificial Sequence: Synthetic peptide
VLAEAMSKV

SEQ ID NO: 6369 - protein, 10 aa, Artificial Sequence
  Description of Artificial Sequence: Synthetic peptide
KVVEVKPLGV

SEQ ID NO: 6370 - protein, 9 aa, Artificial Sequence
  Description of Artificial Sequence: Synthetic peptide
ILAIVVWII

SEQ ID NO: 6371 - protein, 10 aa, Artificial Sequence
  Description of Artificial Sequence: Synthetic peptide
AIFWDDLRSL

SEQ ID NO: 6372 - protein, 9 aa, Artificial Sequence
  Description of Artificial Sequence: Synthetic peptide
IVTDSQYAL

SEQ ID NO: 6373 - protein, 11 aa, Artificial Sequence
  Description of Artificial Sequence: Synthetic peptide
FLKEKGGLEGL

SEQ ID NO: 6374 - protein, 9 aa, Artificial Sequence
  Description of Artificial Sequence: Synthetic peptide
IIVGGLIGL

SEQ ID NO: 6375 - protein, 8 aa, Artificial Sequence
  Description of Artificial Sequence: Synthetic peptide
YTNTIYRL

SEQ ID NO: 6376 - protein, 9 aa, Artificial Sequence
  Description of Artificial Sequence: Synthetic peptide
ALNPGLLET

SEQ ID NO: 6377 - protein, 9 aa, Artificial Sequence
  Description of Artificial Sequence: Synthetic peptide
VIVAFIVAL

SEQ ID NO: 6378 - protein, 9 aa, Artificial Sequence
  Description of Artificial Sequence: Synthetic peptide
ELQKQITKV

SEQ ID NO: 6379 - protein, 9 aa, Artificial Sequence
  Description of Artificial Sequence: Synthetic peptide
KALTDIVTL

SEQ ID NO: 6380 - protein, 9 aa, Artificial Sequence
  Description of Artificial Sequence: Synthetic peptide
LLQLTVWGI

SEQ ID NO: 6381 - protein, 9 aa, Artificial Sequence
  Description of Artificial Sequence: Synthetic peptide
NLFDTTAIV

SEQ ID NO: 6382 - protein, 9 aa, Artificial Sequence
  Description of Artificial Sequence: Synthetic peptide
IIVIIVWTI

SEQ ID NO: 6383 - protein, 9 aa, Artificial Sequence
  Description of Artificial Sequence: Synthetic peptide
TLQEQIAWM

SEQ ID NO: 6384 - protein, 9 aa, Artificial Sequence
  Description of Artificial Sequence: Synthetic peptide
KAYALFYKL

SEQ ID NO: 6385 - protein, 9 aa, Artificial Sequence
  Description of Artificial Sequence: Synthetic peptide
KIVGGLIGL

SEQ ID NO: 6386 - protein, 11 aa, Artificial Sequence
  Description of Artificial Sequence: Synthetic peptide
NLFNSTKLELF

SEQ ID NO: 6387 - protein, 11 aa, Artificial Sequence
  Description of Artificial Sequence: Synthetic peptide
VQLGIPHPAGL

SEQ ID NO: 6388 - protein, 11 aa, Artificial Sequence
  Description of Artificial Sequence: Synthetic peptide
VLQDNSDIKVV

SEQ ID NO: 6389 - protein, 10 aa, Artificial Sequence
  Description of Artificial Sequence: Synthetic peptide
RTQDFWEVQL

SEQ ID NO: 6390 - protein, 10 aa, Artificial Sequence
  Description of Artificial Sequence: Synthetic peptide
NLFDTTAIVV

SEQ ID NO: 6391 - protein, 10 aa, Artificial Sequence
  Description of Artificial Sequence: Synthetic peptide
YLRDQQLLGI

SEQ ID NO: 6392 - protein, 9 aa, Artificial Sequence
  Description of Artificial Sequence: Synthetic peptide
TLQEVGKKL

SEQ ID NO: 6393 - protein, 10 aa, Artificial Sequence
  Description of Artificial Sequence: Synthetic peptide
KLVPVDPREV

SEQ ID NO: 6394 - protein, 9 aa, Artificial Sequence
  Description of Artificial Sequence: Synthetic peptide
TLQEQITWM

SEQ ID NO: 6395 - protein, 9 aa, Artificial Sequence
  Description of Artificial Sequence: Synthetic peptide
ALFYRLDIV

SEQ ID NO: 6396 - protein, 8 aa, Artificial Sequence
  Description of Artificial Sequence: Synthetic peptide
ALTDIVTL

SEQ ID NO: 6397 - protein, 9 aa, Artificial Sequence
  Description of Artificial Sequence: Synthetic peptide
KLTPLCVTL

SEQ ID NO: 6398 - protein, 10 aa, Artificial Sequence
  Description of Artificial Sequence: Synthetic peptide
ILIAARTVEL

SEQ ID NO: 6399 - protein, 9 aa, Artificial Sequence
  Description of Artificial Sequence: Synthetic peptide
VLAEAMSQI

SEQ ID NO: 6400 - protein, 9 aa, Artificial Sequence
  Description of Artificial Sequence: Synthetic peptide
NLLDRIAIA

SEQ ID NO: 6401 - protein, 9 aa, Artificial Sequence
  Description of Artificial Sequence: Synthetic peptide
AVISIVNRV

SEQ ID NO: 6402 - protein, 9 aa, Artificial Sequence
  Description of Artificial Sequence: Synthetic peptide
VVAEGTDRL

SEQ ID NO: 6403 - protein, 9 aa, Artificial Sequence
  Description of Artificial Sequence: Synthetic peptide
VLAEAMSQV

SEQ ID NO: 6404 - protein, 11 aa, Artificial Sequence
  Description of Artificial Sequence: Synthetic peptide
TQVDPGLADHL

SEQ ID NO: 6405 - protein, 9 aa, Artificial Sequence
  Description of Artificial Sequence: Synthetic peptide
AVAEGTDRI

SEQ ID NO: 6406 - protein, 9 aa, Artificial Sequence
  Description of Artificial Sequence: Synthetic peptide
VLAEAMSKV

SEQ ID NO: 6407 - protein, 9 aa, Artificial Sequence
  Description of Artificial Sequence: Synthetic peptide
IVNQIIEQL

SEQ ID NO: 6408 - protein, 11 aa, Artificial Sequence
  Description of Artificial Sequence: Synthetic peptide
TQVDPGLADQL

SEQ ID NO: 6409 - protein, 9 aa, Artificial Sequence
  Description of Artificial Sequence: Synthetic peptide
RIIEVIQGI

SEQ ID NO: 6410 - protein, 9 aa, Artificial Sequence
  Description of Artificial Sequence: Synthetic peptide
AVLSIVNRV

SEQ ID NO: 6411 - protein, 11 aa, Artificial Sequence
  Description of Artificial Sequence: Synthetic peptide
VVIQDNSDIKV

SEQ ID NO: 6412 - protein, 9 aa, Artificial Sequence
  Description of Artificial Sequence: Synthetic peptide
IEIKDTKEA

SEQ ID NO: 6413 - protein, 9 aa, Artificial Sequence
  Description of Artificial Sequence: Synthetic peptide
VLAEAMSQI

SEQ ID NO: 6414 - protein, 10 aa, Artificial Sequence
  Description of Artificial Sequence: Synthetic peptide
REFPSEQTRA

SEQ ID NO: 6415 - protein, 10 aa, Artificial Sequence
  Description of Artificial Sequence: Synthetic peptide
AVNPGLLETA

SEQ ID NO: 6416 - protein, 10 aa, Artificial Sequence
  Description of Artificial Sequence: Synthetic peptide
SEFNLPPIVA

SEQ ID NO: 6417 - protein, 9 aa, Artificial Sequence
  Description of Artificial Sequence: Synthetic peptide
SAISLFDTI

SEQ ID NO: 6418 - protein, 10 aa, Artificial Sequence
  Description of Artificial Sequence: Synthetic peptide
GEIIGDIRQA

SEQ ID NO: 6419 - protein, 9 aa, Artificial Sequence
  Description of Artificial Sequence: Synthetic peptide
WTVNDIQKL

SEQ ID NO: 6420 - protein, 9 aa, Artificial Sequence
  Description of Artificial Sequence: Synthetic peptide
LEKEPIAEA

SEQ ID NO: 6421 - protein, 9 aa, Artificial Sequence
  Description of Artificial Sequence: Synthetic peptide
GAASITLTV

SEQ ID NO: 6422 - protein, 9 aa, Artificial Sequence
  Description of Artificial Sequence: Synthetic peptide
IVTDSQYAL

SEQ ID NO: 6423 - protein, 9 aa, Artificial Sequence
  Description of Artificial Sequence: Synthetic peptide
EIIGDIRQA

SEQ ID NO: 6424 - protein, 11 aa, Artificial Sequence
  Description of Artificial Sequence: Synthetic peptide
TQVEPGLADQL

SEQ ID NO: 6425 - protein, 9 aa, Artificial Sequence
  Description of Artificial Sequence: Synthetic peptide
EIIGNIRQA

SEQ ID NO: 6426 - protein, 9 aa, Artificial Sequence
  Description of Artificial Sequence: Synthetic peptide
RLIEGLQGI

SEQ ID NO: 6427 - protein, 9 aa, Artificial Sequence
  Description of Artificial Sequence: Synthetic peptide
SLFNTVATL

SEQ ID NO: 6428 - protein, 9 aa, Artificial Sequence
  Description of Artificial Sequence: Synthetic peptide
LVNQIIEQL

SEQ ID NO: 6429 - protein, 9 aa, Artificial Sequence
  Description of Artificial Sequence: Synthetic peptide
ASITLTVQA

SEQ ID NO: 6430 - protein, 10 aa, Artificial Sequence
  Description of Artificial Sequence: Synthetic peptide
KVVEIKPLGV

SEQ ID NO: 6431 - protein, 10 aa, Artificial Sequence
  Description of Artificial Sequence: Synthetic peptide
SQYALGIIQA

SEQ ID NO: 6432 - protein, 10 aa, Artificial Sequence
  Description of Artificial Sequence: Synthetic peptide
KVVEVKPLGV

SEQ ID NO: 6433 - protein, 9 aa, Artificial Sequence
  Description of Artificial Sequence: Synthetic peptide
RAIEAQQHL

SEQ ID NO: 6434 - protein, 9 aa, Artificial Sequence
  Description of Artificial Sequence: Synthetic peptide
QLTAVVQKI

SEQ ID NO: 6435 - protein, 9 aa, Artificial Sequence
  Description of Artificial Sequence: Synthetic peptide
LEKEPIAGA

SEQ ID NO: 6436 - protein, 10 aa, Artificial Sequence
  Description of Artificial Sequence: Synthetic peptide
VLFLDGINKA

SEQ ID NO: 6437 - protein, 9 aa, Artificial Sequence
  Description of Artificial Sequence: Synthetic peptide
LEIGQHRAP

SEQ ID NO: 6438 - protein, 9 aa, Artificial Sequence
  Description of Artificial Sequence: Synthetic peptide
QLTEAVQKI

SEQ ID NO: 6439 - protein, 9 aa, Artificial Sequence
  Description of Artificial Sequence: Synthetic peptide
SQIYPGIQV

SEQ ID NO: 6440 - protein, 9 aa, Artificial Sequence
  Description of Artificial Sequence: Synthetic peptide
ASITLTVQV

SEQ ID NO: 6441 - protein, 9 aa, Artificial Sequence
  Description of Artificial Sequence: Synthetic peptide
REFPPETRA

SEQ ID NO: 6442 - protein, 9 aa, Artificial Sequence
  Description of Artificial Sequence: Synthetic peptide
SAINLLDRI

SEQ ID NO: 6443 - protein, 9 aa, Artificial Sequence
  Description of Artificial Sequence: Synthetic peptide
SQIYPGIKV

SEQ ID NO: 6444 - protein, 9 aa, Artificial Sequence
  Description of Artificial Sequence: Synthetic peptide
TETLLVQNA

SEQ ID NO: 6445 - protein, 9 aa, Artificial Sequence
  Description of Artificial Sequence: Synthetic peptide
FTSAAVKAA

SEQ ID NO: 6446 - protein, 10 aa, Artificial Sequence
  Description of Artificial Sequence: Synthetic peptide
KAYDTEVHNV

SEQ ID NO: 6447 - protein, 10 aa, Artificial Sequence
  Description of Artificial Sequence: Synthetic peptide
REFSPEQTRA

SEQ ID NO: 6448 - protein, 9 aa, Artificial Sequence
  Description of Artificial Sequence: Synthetic peptide
ILKEPVHGV

SEQ ID NO: 6449 - protein, 9 aa, Artificial Sequence
  Description of Artificial Sequence: Synthetic peptide
DIIGDIRQA

SEQ ID NO: 6450 - protein, 9 aa, Artificial Sequence
  Description of Artificial Sequence: Synthetic peptide
QNFPIVQNL

SEQ ID NO: 6451 - protein, 9 aa, Artificial Sequence
  Description of Artificial Sequence: Synthetic peptide
AVISIVNRV

SEQ ID NO: 6452 - protein, 9 aa, Artificial Sequence
  Description of Artificial Sequence: Synthetic peptide
IVTDSQYAL

SEQ ID NO: 6453 - protein, 9 aa, Artificial Sequence
  Description of Artificial Sequence: Synthetic peptide
RLIEGLQGI

SEQ ID NO: 6454 - protein, 9 aa, Artificial Sequence
  Description of Artificial Sequence: Synthetic peptide
IQDNSDIKV

SEQ ID NO: 6455 - protein, 9 aa, Artificial Sequence
  Description of Artificial Sequence: Synthetic peptide
YSTQVDPGL

SEQ ID NO: 6456 - protein, 11 aa, Artificial Sequence
  Description of Artificial Sequence: Synthetic peptide
VVIQDNSDIKV

SEQ ID NO: 6457 - protein, 10 aa, Artificial Sequence
  Description of Artificial Sequence: Synthetic peptide
KVVEVKPLGV

SEQ ID NO: 6458 - protein, 9 aa, Artificial Sequence
  Description of Artificial Sequence: Synthetic peptide
SAISLFDTI

SEQ ID NO: 6459 - protein, 9 aa, Artificial Sequence
  Description of Artificial Sequence: Synthetic peptide
AVLSIVNRV

SEQ ID NO: 6460 - protein, 11 aa, Artificial Sequence
  Description of Artificial Sequence: Synthetic peptide
VVLQDNSDIKV

SEQ ID NO: 6461 - protein, 10 aa, Artificial Sequence
  Description of Artificial Sequence: Synthetic peptide
KVVEIKPLGV

SEQ ID NO: 6462 - protein, 9 aa, Artificial Sequence
  Description of Artificial Sequence: Synthetic peptide
RIIEVIQGI

SEQ ID NO: 6463 - protein, 9 aa, Artificial Sequence
  Description of Artificial Sequence: Synthetic peptide
VLAEAMSQV

SEQ ID NO: 6464 - protein, 11 aa, Artificial Sequence
  Description of Artificial Sequence: Synthetic peptide
TQVDPGLADQL

SEQ ID NO: 6465 - protein, 9 aa, Artificial Sequence
  Description of Artificial Sequence: Synthetic peptide
YSTRVDPGL

SEQ ID NO: 6466 - protein, 11 aa, Artificial Sequence
  Description of Artificial Sequence: Synthetic peptide
TQVDPGLADHL

SEQ ID NO: 6467 - protein, 9 aa, Artificial Sequence
  Description of Artificial Sequence: Synthetic peptide
GGIGGFIKV

SEQ ID NO: 6468 - protein, 9 aa, Artificial Sequence
  Description of Artificial Sequence: Synthetic peptide
SQIYPGIKV

SEQ ID NO: 6469 - protein, 9 aa, Artificial Sequence
  Description of Artificial Sequence: Synthetic peptide
SQIYPGIQV

SEQ ID NO: 6470 - protein, 11 aa, Artificial Sequence
  Description of Artificial Sequence: Synthetic peptide
TQVEPGLADQL

SEQ ID NO: 6471 - protein, 9 aa, Artificial Sequence
  Description of Artificial Sequence: Synthetic peptide
VVAEGTDRL

SEQ ID NO: 6472 - protein, 9 aa, Artificial Sequence
  Description of Artificial Sequence: Synthetic peptide
KALTDIVTL

SEQ ID NO: 6473 - protein, 9 aa, Artificial Sequence
  Description of Artificial Sequence: Synthetic peptide
QLTAVVQKI

SEQ ID NO: 6474 - protein, 9 aa, Artificial Sequence
  Description of Artificial Sequence: Synthetic peptide
SAINLLDRI

SEQ ID NO: 6475 - protein, 10 aa, Artificial Sequence
  Description of Artificial Sequence: Synthetic peptide
TVLDVGDAYF

SEQ ID NO: 6476 - protein, 9 aa, Artificial Sequence
  Description of Artificial Sequence: Synthetic peptide
VLAEAMSKV

SEQ ID NO: 6477 - protein, 9 aa, Artificial Sequence
  Description of Artificial Sequence: Synthetic peptide
VQLNESVEI

SEQ ID NO: 6478 - protein, 9 aa, Artificial Sequence
  Description of Artificial Sequence: Synthetic peptide
YSTQVEPGL

SEQ ID NO: 6479 - protein, 9 aa, Artificial Sequence
  Description of Artificial Sequence: Synthetic peptide
ASITLTVQV

SEQ ID NO: 6480 - protein, 9 aa, Artificial Sequence
  Description of Artificial Sequence: Synthetic peptide
VLAEAMSQI

SEQ ID NO: 6481 - protein, 9 aa, Artificial Sequence
  Description of Artificial Sequence: Synthetic peptide
GAASITLTV

SEQ ID NO: 6482 - protein, 9 aa, Artificial Sequence
  Description of Artificial Sequence: Synthetic peptide
QLTEAVQKI

SEQ ID NO: 6483 - protein, 9 aa, Artificial Sequence
  Description of Artificial Sequence: Synthetic peptide
GVLSIVKRV

SEQ ID NO: 6484 - protein, 9 aa, Artificial Sequence
  Description of Artificial Sequence: Synthetic peptide
IVNQIIEQL

SEQ ID NO: 6485 - protein, 9 aa, Artificial Sequence
  Description of Artificial Sequence: Synthetic peptide
VVPKEIVAC

SEQ ID NO: 6486 - protein, 9 aa, Artificial Sequence
  Description of Artificial Sequence: Synthetic peptide
LQDNSDIKV

SEQ ID NO: 6487 - protein, 9 aa, Artificial Sequence
  Description of Artificial Sequence: Synthetic peptide
GQVFYTNEI

SEQ ID NO: 6488 - protein, 9 aa, Artificial Sequence
  Description of Artificial Sequence: Synthetic peptide
AVAEGTDRI

SEQ ID NO: 6489 - protein, 11 aa, Artificial Sequence
  Description of Artificial Sequence: Synthetic peptide
FQPPAGGDLEV

SEQ ID NO: 6490 - protein, 10 aa, Artificial Sequence
  Description of Artificial Sequence: Synthetic peptide
YVDGAANREI

SEQ ID NO: 6491 - protein, 9 aa, Artificial Sequence
  Description of Artificial Sequence: Synthetic peptide
YNTQVDPGL

SEQ ID NO: 6492 - protein, 9 aa, Artificial Sequence
  Description of Artificial Sequence: Synthetic peptide
KVSQNFPIV

SEQ ID NO: 6493 - protein, 9 aa, Artificial Sequence
  Description of Artificial Sequence: Synthetic peptide
YVDRFFKTL

SEQ ID NO: 6494 - protein, 9 aa, Artificial Sequence
  Description of Artificial Sequence: Synthetic peptide
LLDRIAIAV

SEQ ID NO: 6495 - protein, 9 aa, Artificial Sequence
  Description of Artificial Sequence: Synthetic peptide
YTDIIYTLL

SEQ ID NO: 6496 - protein, 9 aa, Artificial Sequence
  Description of Artificial Sequence: Synthetic peptide
AVLSIVNRV

SEQ ID NO: 6497 - protein, 9 aa, Artificial Sequence
  Description of Artificial Sequence: Synthetic peptide
IIDIIATDL

SEQ ID NO: 6498 - protein, 9 aa, Artificial Sequence
  Description of Artificial Sequence: Synthetic peptide
YTDIIYNLL

SEQ ID NO: 6499 - protein, 9 aa, Artificial Sequence
  Description of Artificial Sequence: Synthetic peptide
GTDRLIEGL

SEQ ID NO: 6500 - protein, 9 aa, Artificial Sequence
  Description of Artificial Sequence: Synthetic peptide
ILKEPVHGV

SEQ ID NO: 6501 - protein, 10 aa, Artificial Sequence
  Description of Artificial Sequence: Synthetic peptide
KVVEVKPLGV

SEQ ID NO: 6502 - protein, 10 aa, Artificial Sequence
  Description of Artificial Sequence: Synthetic peptide
YVDGAANREI

SEQ ID NO: 6503 - protein, 9 aa, Artificial Sequence
  Description of Artificial Sequence: Synthetic peptide
VLAEAMSKV

SEQ ID NO: 6504 - protein, 9 aa, Artificial Sequence
  Description of Artificial Sequence: Synthetic peptide
FSPEVIPMF

SEQ ID NO: 6505 - protein, 9 aa, Artificial Sequence
  Description of Artificial Sequence: Synthetic peptide
VLAEAMSQV

SEQ ID NO: 6506 - protein, 9 aa, Artificial Sequence
  Description of Artificial Sequence: Synthetic peptide
AVISIVNRV

SEQ ID NO: 6507 - protein, 9 aa, Artificial Sequence
  Description of Artificial Sequence: Synthetic peptide
HLEGKIILV

SEQ ID NO: 6508 - protein, 9 aa, Artificial Sequence
  Description of Artificial Sequence: Synthetic peptide
AYDAEVHNV

SEQ ID NO: 6509 - protein, 10 aa, Artificial Sequence
  Description of Artificial Sequence: Synthetic peptide
KVVEIKPLGV

SEQ ID NO: 6510 - protein, 9 aa, Artificial Sequence
  Description of Artificial Sequence: Synthetic peptide
AVISIVNRV

SEQ ID NO: 6511 - protein, 10 aa, Artificial Sequence
  Description of Artificial Sequence: Synthetic peptide
KVVEVKPLGV

SEQ ID NO: 6512 - protein, 10 aa, Artificial Sequence
  Description of Artificial Sequence: Synthetic peptide
KVVEIKPLGV

SEQ ID NO: 6513 - protein, 10 aa, Artificial Sequence
  Description of Artificial Sequence: Synthetic peptide
KVTNNSINSA

SEQ ID NO: 6514 - protein, 9 aa, Artificial Sequence
  Description of Artificial Sequence: Synthetic peptide
RIIEVIQGI

SEQ ID NO: 6515 - protein, 9 aa, Artificial Sequence
  Description of Artificial Sequence: Synthetic peptide
RLIEGLQGI

SEQ ID NO: 6516 - protein, 9 aa, Artificial Sequence
  Description of Artificial Sequence: Synthetic peptide
IVNQIIEQL

SEQ ID NO: 6517 - protein, 10 aa, Artificial Sequence
  Description of Artificial Sequence: Synthetic peptide
REFPSEQTRA

SEQ ID NO: 6518 - protein, 9 aa, Artificial Sequence
  Description of Artificial Sequence: Synthetic peptide
KIVGGLIGL

SEQ ID NO: 6519 - protein, 9 aa, Artificial Sequence
  Description of Artificial Sequence: Synthetic peptide
WTVNDIQKL

SEQ ID NO: 6520 - protein, 9 aa, Artificial Sequence
  Description of Artificial Sequence: Synthetic peptide
IEIKDTKEA

SEQ ID NO: 6521 - protein, 10 aa, Artificial Sequence
  Description of Artificial Sequence: Synthetic peptide
RVLAEAMSKV

SEQ ID NO: 6522 - protein, 10 aa, Artificial Sequence
  Description of Artificial Sequence: Synthetic peptide
KAYDTEVHNV

SEQ ID NO: 6523 - protein, 9 aa, Artificial Sequence
  Description of Artificial Sequence: Synthetic peptide
AVLSIVNRV

SEQ ID NO: 6524 - protein, 9 aa, Artificial Sequence
  Description of Artificial Sequence: Synthetic peptide
VLAEAMSKV

SEQ ID NO: 6525 - protein, 9 aa, Artificial Sequence
  Description of Artificial Sequence: Synthetic peptide
EIIGDIRQA

SEQ ID NO: 6526 - protein, 10 aa, Artificial Sequence
  Description of Artificial Sequence: Synthetic peptide
AVNPGLLETA

SEQ ID NO: 6527 - protein, 10 aa, Artificial Sequence
  Description of Artificial Sequence: Synthetic peptide
KAYDAEVHNV

SEQ ID NO: 6528 - protein, 9 aa, Artificial Sequence
  Description of Artificial Sequence: Synthetic peptide
KIKPPLPSV

SEQ ID NO: 6529 - protein, 9 aa, Artificial Sequence
  Description of Artificial Sequence: Synthetic peptide
VVAEGTDRL

SEQ ID NO: 6530 - protein, 9 aa, Artificial Sequence
  Description of Artificial Sequence: Synthetic peptide
VLAEAMSQV

SEQ ID NO: 6531 - protein, 9 aa, Artificial Sequence
  Description of Artificial Sequence: Synthetic peptide
EIIGNIRQA

SEQ ID NO: 6532 - protein, 10 aa, Artificial Sequence
  Description of Artificial Sequence: Synthetic peptide
GEIIGDIRQA

SEQ ID NO: 6533 - protein, 10 aa, Artificial Sequence
  Description of Artificial Sequence: Synthetic peptide
RVLAEAMSQV

SEQ ID NO: 6534 - protein, 10 aa, Artificial Sequence
  Description of Artificial Sequence: Synthetic peptide
KTYNESMKEI

SEQ ID NO: 6535 - protein, 11 aa, Artificial Sequence
  Description of Artificial Sequence: Synthetic peptide
VVIQDNSDIKV

SEQ ID NO: 6536 - protein, 9 aa, Artificial Sequence
  Description of Artificial Sequence: Synthetic peptide
QLTAVVQKI

SEQ ID NO: 6537 - protein, 9 aa, Artificial Sequence
  Description of Artificial Sequence: Synthetic peptide
ALIRTLQQL

SEQ ID NO: 6538 - protein, 10 aa, Artificial Sequence
  Description of Artificial Sequence: Synthetic peptide
REFSPEQTRA

SEQ ID NO: 6539 - protein, 9 aa, Artificial Sequence
  Description of Artificial Sequence: Synthetic peptide
GTAGSTMGA

SEQ ID NO: 6540 - protein, 9 aa, Artificial Sequence
  Description of Artificial Sequence: Synthetic peptide
RAAPAAEGV

SEQ ID NO: 6541 - protein, 9 aa, Artificial Sequence
  Description of Artificial Sequence: Synthetic peptide
KIVSITETT

SEQ ID NO: 6542 - protein, 9 aa, Artificial Sequence
  Description of Artificial Sequence: Synthetic peptide
VVPKEIVAC

SEQ ID NO: 6543 - protein, 9 aa, Artificial Sequence
  Description of Artificial Sequence: Synthetic peptide
ILKEPVHGV

SEQ ID NO: 6544 - protein, 11 aa, Artificial Sequence
  Description of Artificial Sequence: Synthetic peptide
RAAPAAEGVGA

SEQ ID NO: 6545 - protein, 9 aa, Artificial Sequence
  Description of Artificial Sequence: Synthetic peptide
KIKPPLPSI

SEQ ID NO: 6546 - protein, 10 aa, Artificial Sequence
  Description of Artificial Sequence: Synthetic peptide
KVVEIKPLGI

SEQ ID NO: 6547 - protein, 9 aa, Artificial Sequence
  Description of Artificial Sequence: Synthetic peptide
KQMAGADCV

SEQ ID NO: 6548 - protein, 9 aa, Artificial Sequence
  Description of Artificial Sequence: Synthetic peptide
LEIGQHRAP

SEQ ID NO: 6549 - protein, 9 aa, Artificial Sequence
  Description of Artificial Sequence: Synthetic peptide
RVASPVSGK

SEQ ID NO: 6550 - protein, 9 aa, Artificial Sequence
  Description of Artificial Sequence: Synthetic peptide
QIYPGIQVK

SEQ ID NO: 6551 - protein, 10 aa, Artificial Sequence
  Description of Artificial Sequence: Synthetic peptide
IVQQQSNLLK

SEQ ID NO: 6552 - protein, 11 aa, Artificial Sequence
  Description of Artificial Sequence: Synthetic peptide
QVNNTTIMMQK

SEQ ID NO: 6553 - protein, 9 aa, Artificial Sequence
  Description of Artificial Sequence: Synthetic peptide
SIFQSSTTK

SEQ ID NO: 6554 - protein, 9 aa, Artificial Sequence
  Description of Artificial Sequence: Synthetic peptide
GVGSPISGK

SEQ ID NO: 6555 - protein, 9 aa, Artificial Sequence
  Description of Artificial Sequence: Synthetic peptide
AIFQSSMTK

SEQ ID NO: 6556 - protein, 10 aa, Artificial Sequence
  Description of Artificial Sequence: Synthetic peptide
AMYAPPIEGK

SEQ ID NO: 6557 - protein, 9 aa, Artificial Sequence
  Description of Artificial Sequence: Synthetic peptide
KLAEHFPNK

SEQ ID NO: 6558 - protein, 9 aa, Artificial Sequence
  Description of Artificial Sequence: Synthetic peptide
RTYMPNDTK

SEQ ID NO: 6559 - protein, 10 aa, Artificial Sequence
  Description of Artificial Sequence: Synthetic peptide
QTNSAILMQR

SEQ ID NO: 6560 - protein, 9 aa, Artificial Sequence
  Description of Artificial Sequence: Synthetic peptide
MVHQPISAR

SEQ ID NO: 6561 - protein, 9 aa, Artificial Sequence
  Description of Artificial Sequence: Synthetic peptide
QIYPGIKVR

SEQ ID NO: 6562 - protein, 10 aa, Artificial Sequence
  Description of Artificial Sequence: Synthetic peptide
ILYQSNPPPK

SEQ ID NO: 6563 - protein, 9 aa, Artificial Sequence
  Description of Artificial Sequence: Synthetic peptide
KILEPFRAK

SEQ ID NO: 6564 - protein, 9 aa, Artificial Sequence
  Description of Artificial Sequence: Synthetic peptide
RVLAEAMSK

SEQ ID NO: 6565 - protein, 10 aa, Artificial Sequence
  Description of Artificial Sequence: Synthetic peptide
TVYYGVPVWK

SEQ ID NO: 6566 - protein, 11 aa, Artificial Sequence
  Description of Artificial Sequence: Synthetic peptide
TVNDIQKLVGK

SEQ ID NO: 6567 - protein, 10 aa, Artificial Sequence
  Description of Artificial Sequence: Synthetic peptide
RVASPVSGKP

SEQ ID NO: 6568 - protein, 9 aa, Artificial Sequence
  Description of Artificial Sequence: Synthetic peptide
AIRKAILGY

SEQ ID NO: 6569 - protein, 9 aa, Artificial Sequence
  Description of Artificial Sequence: Synthetic peptide
GVGNPISGK

SEQ ID NO: 6570 - protein, 9 aa, Artificial Sequence
  Description of Artificial Sequence: Synthetic peptide
QIIEQLISK

SEQ ID NO: 6571 - protein, 10 aa, Artificial Sequence
  Description of Artificial Sequence: Synthetic peptide
KTQKVNALFY

SEQ ID NO: 6572 - protein, 9 aa, Artificial Sequence
  Description of Artificial Sequence: Synthetic peptide
TLSETTNQK

SEQ ID NO: 6573 - protein, 9 aa, Artificial Sequence
  Description of Artificial Sequence: Synthetic peptide
GVAPTTAKR

SEQ ID NO: 6574 - protein, 11 aa, Artificial Sequence
  Description of Artificial Sequence: Synthetic peptide
QVNNTTIMMQK

SEQ ID NO: 6575 - protein, 10 aa, Artificial Sequence
  Description of Artificial Sequence: Synthetic peptide
IVQQQSNLLK

SEQ ID NO: 6576 - protein, 11 aa, Artificial Sequence
  Description of Artificial Sequence: Synthetic peptide
TVNDIQKLVGK

SEQ ID NO: 6577 - protein, 9 aa, Artificial Sequence
  Description of Artificial Sequence: Synthetic peptide
RVASPVSGK

SEQ ID NO: 6578 - protein, 9 aa, Artificial Sequence
  Description of Artificial Sequence: Synthetic peptide
QIYPGIQVK

SEQ ID NO: 6579 - protein, 10 aa, Artificial Sequence
  Description of Artificial Sequence: Synthetic peptide
TVQPIQLPEK

SEQ ID NO: 6580 - protein, 9 aa, Artificial Sequence
  Description of Artificial Sequence: Synthetic peptide
GVGSPISGK

SEQ ID NO: 6581 - protein, 10 aa, Artificial Sequence
  Description of Artificial Sequence: Synthetic peptide
AIQTGTEELK

SEQ ID NO: 6582 - protein, 9 aa, Artificial Sequence
  Description of Artificial Sequence: Synthetic peptide
IIASDIQTK

SEQ ID NO: 6583 - protein, 9 aa, Artificial Sequence
  Description of Artificial Sequence: Synthetic peptide
AIFQSSMTK

SEQ ID NO: 6584 - protein, 9 aa, Artificial Sequence
  Description of Artificial Sequence: Synthetic peptide
SIFQSSTTK

SEQ ID NO: 6585 - protein, 11 aa, Artificial Sequence
  Description of Artificial Sequence: Synthetic peptide
IVSITETTNQK

SEQ ID NO: 6586 - protein, 10 aa, Artificial Sequence
  Description of Artificial Sequence: Synthetic peptide
GSNFTSAAVK

SEQ ID NO: 6587 - protein, 10 aa, Artificial Sequence
  Description of Artificial Sequence: Synthetic peptide
ALQTGTEELK

SEQ ID NO: 6588 - protein, 9 aa, Artificial Sequence
  Description of Artificial Sequence: Synthetic peptide
TLSETTNQK

SEQ ID NO: 6589 - protein, 10 aa, Artificial Sequence
  Description of Artificial Sequence: Synthetic peptide
AMYAPPIEGK

SEQ ID NO: 6590 - protein, 10 aa, Artificial Sequence
  Description of Artificial Sequence: Synthetic peptide
GSNFISNTVK

SEQ ID NO: 6591 - protein, 9 aa, Artificial Sequence
  Description of Artificial Sequence: Synthetic peptide
RTYMPNDTK

SEQ ID NO: 6592 - protein, 10 aa, Artificial Sequence
  Description of Artificial Sequence: Synthetic peptide
GSNFTSNAVK

SEQ ID NO: 6593 - protein, 9 aa, Artificial Sequence
  Description of Artificial Sequence: Synthetic peptide
RVLAEAMSK

SEQ ID NO: 6594 - protein, 10 aa, Artificial Sequence
  Description of Artificial Sequence: Synthetic peptide
QTNSAILMQR

SEQ ID NO: 6595 - protein, 11 aa, Artificial Sequence
  Description of Artificial Sequence: Synthetic peptide
IVSLTETTNQK

SEQ ID NO: 6596 - protein, 9 aa, Artificial Sequence
  Description of Artificial Sequence: Synthetic peptide
RVGNPVFGR

SEQ ID NO: 6597 - protein, 9 aa, Artificial Sequence
  Description of Artificial Sequence: Synthetic peptide
KLAEHFPNK

SEQ ID NO: 6598 - protein, 9 aa, Artificial Sequence
  Description of Artificial Sequence: Synthetic peptide
GVGNPISGK

SEQ ID NO: 6599 - protein, 11 aa, Artificial Sequence
  Description of Artificial Sequence: Synthetic peptide
ASQIYPGIQVK

SEQ ID NO: 6600 - protein, 10 aa, Artificial Sequence
  Description of Artificial Sequence: Synthetic peptide
GLQTGWQALK

SEQ ID NO: 6601 - protein, 11 aa, Artificial Sequence
  Description of Artificial Sequence: Synthetic peptide
QSQGVVESMNK

SEQ ID NO: 6602 - protein, 9 aa, Artificial Sequence
  Description of Artificial Sequence: Synthetic peptide
QIIEQLISK

SEQ ID NO: 6603 - protein, 10 aa, Artificial Sequence
  Description of Artificial Sequence: Synthetic peptide
ILYQSNPPPK

SEQ ID NO: 6604 - protein, 11 aa, Artificial Sequence
  Description of Artificial Sequence: Synthetic peptide
YVDGASNRETK

SEQ ID NO: 6605 - protein, 9 aa, Artificial Sequence
  Description of Artificial Sequence: Synthetic peptide
GIIQAQPNK

SEQ ID NO: 6606 - protein, 9 aa, Artificial Sequence
  Description of Artificial Sequence: Synthetic peptide
ASDAKAYEK

SEQ ID NO: 6607 - protein, 9 aa, Artificial Sequence
  Description of Artificial Sequence: Synthetic peptide
SITETTNQK

SEQ ID NO: 6608 - protein, 9 aa, Artificial Sequence
  Description of Artificial Sequence: Synthetic peptide
IIATDIQTK

SEQ ID NO: 6609 - protein, 9 aa, Artificial Sequence
  Description of Artificial Sequence: Synthetic peptide
STITQACPK

SEQ ID NO: 6610 - protein, 8 aa, Artificial Sequence
  Description of Artificial Sequence: Synthetic peptide
VLAEAMSK

SEQ ID NO: 6611 - protein, 10 aa, Artificial Sequence
  Description of Artificial Sequence: Synthetic peptide
ITLSETTNQK

SEQ ID NO: 6612 - protein, 10 aa, Artificial Sequence
  Description of Artificial Sequence: Synthetic peptide
ATESIVIWGK

SEQ ID NO: 6613 - protein, 9 aa, Artificial Sequence
  Description of Artificial Sequence: Synthetic peptide
KQLTEAVQK

SEQ ID NO: 6614 - protein, 11 aa, Artificial Sequence
  Description of Artificial Sequence: Synthetic peptide
ATDIQTKELQK

SEQ ID NO: 6615 - protein, 9 aa, Artificial Sequence
  Description of Artificial Sequence: Synthetic peptide
IIATDLQTK

SEQ ID NO: 6616 - protein, 10 aa, Artificial Sequence
  Description of Artificial Sequence: Synthetic peptide
SILDIKQGPK

SEQ ID NO: 6617 - protein, 9 aa, Artificial Sequence
  Description of Artificial Sequence: Synthetic peptide
VQQQSNLLK

SEQ ID NO: 6618 - protein, 10 aa, Artificial Sequence
  Description of Artificial Sequence: Synthetic peptide
VVESMNKELK

SEQ ID NO: 6619 - protein, 9 aa, Artificial Sequence
  Description of Artificial Sequence: Synthetic peptide
QIYPGIQVK

SEQ ID NO: 6620 - protein, 10 aa, Artificial Sequence
  Description of Artificial Sequence: Synthetic peptide
IVQQQSNLLK

SEQ ID NO: 6621 - protein, 9 aa, Artificial Sequence
  Description of Artificial Sequence: Synthetic peptide
STITQACPK

SEQ ID NO: 6622 - protein, 10 aa, Artificial Sequence
  Description of Artificial Sequence: Synthetic peptide
QTNSAILMQR

SEQ ID NO: 6623 - protein, 10 aa, Artificial Sequence
  Description of Artificial Sequence: Synthetic peptide
GSNFISNTVK

SEQ ID NO: 6624 - protein, 11 aa, Artificial Sequence
  Description of Artificial Sequence: Synthetic peptide
QVNNTTIMMQK

SEQ ID NO: 6625 - protein, 9 aa, Artificial Sequence
  Description of Artificial Sequence: Synthetic peptide
GVGSPISGK

SEQ ID NO: 6626 - protein, 11 aa, Artificial Sequence
  Description of Artificial Sequence: Synthetic peptide
TVNDIQKLVGK

SEQ ID NO: 6627 - protein, 9 aa, Artificial Sequence
  Description of Artificial Sequence: Synthetic peptide
QIIEQLISK

SEQ ID NO: 6628 - protein, 9 aa, Artificial Sequence
  Description of Artificial Sequence: Synthetic peptide
RTYMPNDTK

SEQ ID NO: 6629 - protein, 10 aa, Artificial Sequence
  Description of Artificial Sequence: Synthetic peptide
TVQPIQLPEK

SEQ ID NO: 6630 - protein, 10 aa, Artificial Sequence
  Description of Artificial Sequence: Synthetic peptide
GSNFTSNAVK

SEQ ID NO: 6631 - protein, 9 aa, Artificial Sequence
  Description of Artificial Sequence: Synthetic peptide
SIFQSSTTK

SEQ ID NO: 6632 - protein, 9 aa, Artificial Sequence
  Description of Artificial Sequence: Synthetic peptide
ASDAKAYEK

SEQ ID NO: 6633 - protein, 9 aa, Artificial Sequence
  Description of Artificial Sequence: Synthetic peptide
ATLYCVHEK

SEQ ID NO: 6634 - protein, 9 aa, Artificial Sequence
  Description of Artificial Sequence: Synthetic peptide
RVASPVSGK

SEQ ID NO: 6635 - protein, 9 aa, Artificial Sequence
  Description of Artificial Sequence: Synthetic peptide
ATLYCVHQK

SEQ ID NO: 6636 - protein, 8 aa, Artificial Sequence
  Description of Artificial Sequence: Synthetic peptide
SDIVPLEK

SEQ ID NO: 6637 - protein, 9 aa, Artificial Sequence
  Description of Artificial Sequence: Synthetic peptide
GIIQAQPNK

SEQ ID NO: 6638 - protein, 10 aa, Artificial Sequence
  Description of Artificial Sequence: Synthetic peptide
GSNFTSAAVK

SEQ ID NO: 6639 - protein, 9 aa, Artificial Sequence
  Description of Artificial Sequence: Synthetic peptide
APAGYAILK

SEQ ID NO: 6640 - protein, 11 aa, Artificial Sequence
  Description of Artificial Sequence: Synthetic peptide
ATDIQTKELQK

SEQ ID NO: 6641 - protein, 9 aa, Artificial Sequence
  Description of Artificial Sequence: Synthetic peptide
AIFQSSMTK

SEQ ID NO: 6642 - protein, 10 aa, Artificial Sequence
  Description of Artificial Sequence: Synthetic peptide
SQIYPGIQVK

SEQ ID NO: 6643 - protein, 9 aa, Artificial Sequence
  Description of Artificial Sequence: Synthetic peptide
SITETTNQK

SEQ ID NO: 6644 - protein, 10 aa, Artificial Sequence
  Description of Artificial Sequence: Synthetic peptide
ATESIVIWGK

SEQ ID NO: 6645 - protein, 10 aa, Artificial Sequence
  Description of Artificial Sequence: Synthetic peptide
VSITETTNQK

SEQ ID NO: 6646 - protein, 9 aa, Artificial Sequence
  Description of Artificial Sequence: Synthetic peptide
GVGNPISGK

SEQ ID NO: 6647 - protein, 9 aa, Artificial Sequence
  Description of Artificial Sequence: Synthetic peptide
RVLAEAMSK

SEQ ID NO: 6648 - protein, 9 aa, Artificial Sequence
  Description of Artificial Sequence: Synthetic peptide
QIIEQLIKK

SEQ ID NO: 6649 - protein, 9 aa, Artificial Sequence
  Description of Artificial Sequence: Synthetic peptide
SAITQACPK

SEQ ID NO: 6650 - protein, 9 aa, Artificial Sequence
  Description of Artificial Sequence: Synthetic peptide
VQQQSNLLK

SEQ ID NO: 6651 - protein, 10 aa, Artificial Sequence
  Description of Artificial Sequence: Synthetic peptide
AMYAPPIEGK

SEQ ID NO: 6652 - protein, 8 aa, Artificial Sequence
  Description of Artificial Sequence: Synthetic peptide
PAGYAILK

SEQ ID NO: 6653 - protein, 10 aa, Artificial Sequence
  Description of Artificial Sequence: Synthetic peptide
AIQTGTEELK

SEQ ID NO: 6654 - protein, 11 aa, Artificial Sequence
  Description of Artificial Sequence: Synthetic peptide
YVDGASNRETK

SEQ ID NO: 6655 - protein, 9 aa, Artificial Sequence
  Description of Artificial Sequence: Synthetic peptide
IIASDIQTK

SEQ ID NO: 6656 - protein, 10 aa, Artificial Sequence
  Description of Artificial Sequence: Synthetic peptide
ITLSETTNQK

SEQ ID NO: 6657 - protein, 9 aa, Artificial Sequence
  Description of Artificial Sequence: Synthetic peptide
KQLTAVVQK

SEQ ID NO: 6658 - protein, 11 aa, Artificial Sequence
  Description of Artificial Sequence: Synthetic peptide
GVVESMNKELK

SEQ ID NO: 6659 - protein, 9 aa, Artificial Sequence
  Description of Artificial Sequence: Synthetic peptide
RVGNPVFGR

SEQ ID NO: 6660 - protein, 11 aa, Artificial Sequence
  Description of Artificial Sequence: Synthetic peptide
ATDLQTKELQK

SEQ ID NO: 6661 - protein, 9 aa, Artificial Sequence
  Description of Artificial Sequence: Synthetic peptide
GVAPTTAKR

SEQ ID NO: 6662 - protein, 9 aa, Artificial Sequence
  Description of Artificial Sequence: Synthetic peptide
QIIEQLIRK

SEQ ID NO: 6663 - protein, 9 aa, Artificial Sequence
  Description of Artificial Sequence: Synthetic peptide
QIYPGIKVR

SEQ ID NO: 6664 - protein, 9 aa, Artificial Sequence
  Description of Artificial Sequence: Synthetic peptide
SALTQACPK

SEQ ID NO: 6665 - protein, 10 aa, Artificial Sequence
  Description of Artificial Sequence: Synthetic peptide
SILDIKQGPK

SEQ ID NO: 6666 - protein, 10 aa, Artificial Sequence
  Description of Artificial Sequence: Synthetic peptide
AAFDLSLFLK

SEQ ID NO: 6667 - protein, 8 aa, Artificial Sequence
  Description of Artificial Sequence: Synthetic peptide
NTTIMMQK

SEQ ID NO: 6668 - protein, 9 aa, Artificial Sequence
  Description of Artificial Sequence: Synthetic peptide
TSNLFNSTK

SEQ ID NO: 6669 - protein, 9 aa, Artificial Sequence
  Description of Artificial Sequence: Synthetic peptide
NYTDIIYTL

SEQ ID NO: 6670 - protein, 9 aa, Artificial Sequence
  Description of Artificial Sequence: Synthetic peptide
NYTDIIYNL

SEQ ID NO: 6671 - protein, 9 aa, Artificial Sequence
  Description of Artificial Sequence: Synthetic peptide
NYTNTIYRL

SEQ ID NO: 6672 - protein, 9 aa, Artificial Sequence
  Description of Artificial Sequence: Synthetic peptide
KYLGSLVQY

SEQ ID NO: 6673 - protein, 9 aa, Artificial Sequence
  Description of Artificial Sequence: Synthetic peptide
VLENVTESF

SEQ ID NO: 6674 - protein, 9 aa, Artificial Sequence
  Description of Artificial Sequence: Synthetic peptide
IYQEPFKNL

SEQ ID NO: 6675 - protein, 9 aa, Artificial Sequence
  Description of Artificial Sequence: Synthetic peptide
TETNKTETF

SEQ ID NO: 6676 - protein, 9 aa, Artificial Sequence
  Description of Artificial Sequence: Synthetic peptide
VLENVTENF

SEQ ID NO: 6677 - protein, 10 aa, Artificial Sequence
  Description of Artificial Sequence: Synthetic peptide
KYLGGLVQYW

SEQ ID NO: 6678 - protein, 9 aa, Artificial Sequence
  Description of Artificial Sequence: Synthetic peptide
RYLKDQQLL

SEQ ID NO: 6679 - protein, 9 aa, Artificial Sequence
  Description of Artificial Sequence: Synthetic peptide
LYASVDYRL

SEQ ID NO: 6680 - protein, 9 aa, Artificial Sequence
  Description of Artificial Sequence: Synthetic peptide
VYIEYRKLL

SEQ ID NO: 6681 - protein, 9 aa, Artificial Sequence
  Description of Artificial Sequence: Synthetic peptide
KYLGGLVQY

SEQ ID NO: 6682 - protein, 9 aa, Artificial Sequence
  Description of Artificial Sequence: Synthetic peptide
RYLRDQQLL

SEQ ID NO: 6683 - protein, 9 aa, Artificial Sequence
  Description of Artificial Sequence: Synthetic peptide
AYIEYRKLL

SEQ ID NO: 6684 - protein, 9 aa, Artificial Sequence
  Description of Artificial Sequence: Synthetic peptide
TQLGRTLNF

SEQ ID NO: 6685 - protein, 9 aa, Artificial Sequence
  Description of Artificial Sequence: Synthetic peptide
FYQEPFKNL

SEQ ID NO: 6686 - protein, 9 aa, Artificial Sequence
  Description of Artificial Sequence: Synthetic peptide
NYTDIIYTL

SEQ ID NO: 6687 - protein, 9 aa, Artificial Sequence
  Description of Artificial Sequence: Synthetic peptide
NYTDIIYNL

SEQ ID NO: 6688 - protein, 9 aa, Artificial Sequence
  Description of Artificial Sequence: Synthetic peptide
NYTNTIYRL

SEQ ID NO: 6689 - protein, 9 aa, Artificial Sequence
  Description of Artificial Sequence: Synthetic peptide
IYATYGDTW

SEQ ID NO: 6690 - protein, 9 aa, Artificial Sequence
  Description of Artificial Sequence: Synthetic peptide
IYQEPFKNL

SEQ ID NO: 6691 - protein, 9 aa, Artificial Sequence
  Description of Artificial Sequence: Synthetic peptide
TYNESMKEI

SEQ ID NO: 6692 - protein, 9 aa, Artificial Sequence
  Description of Artificial Sequence: Synthetic peptide
RYLKDQQLL

SEQ ID NO: 6693 - protein, 9 aa, Artificial Sequence
  Description of Artificial Sequence: Synthetic peptide
QYDQIIIEI

SEQ ID NO: 6694 - protein, 9 aa, Artificial Sequence
  Description of Artificial Sequence: Synthetic peptide
FYQEPFKNL

SEQ ID NO: 6695 - protein, 9 aa, Artificial Sequence
  Description of Artificial Sequence: Synthetic peptide
RYLRDQQLL

SEQ ID NO: 6696 - protein, 10 aa, Artificial Sequence
  Description of Artificial Sequence: Synthetic peptide
IYPGIQVKQL

SEQ ID NO: 6697 - protein, 9 aa, Artificial Sequence
  Description of Artificial Sequence: Synthetic peptide
YYDPSKDLI

SEQ ID NO: 6698 - protein, 9 aa, Artificial Sequence
  Description of Artificial Sequence: Synthetic peptide
IYNVRGNLW

SEQ ID NO: 6699 - protein, 10 aa, Artificial Sequence
  Description of Artificial Sequence: Synthetic peptide
DTINEEAAEW

SEQ ID NO: 6700 - protein, 9 aa, Artificial Sequence
  Description of Artificial Sequence: Synthetic peptide
EVIPMFTAL

SEQ ID NO: 6701 - protein, 9 aa, Artificial Sequence
  Description of Artificial Sequence: Synthetic peptide
ETMVDMGHL

SEQ ID NO: 6702 - protein, 9 aa, Artificial Sequence
  Description of Artificial Sequence: Synthetic peptide
DIAGTTSTL

SEQ ID NO: 6703 - protein, 10 aa, Artificial Sequence
  Description of Artificial Sequence: Synthetic peptide
SISERILSTF

SEQ ID NO: 6704 - protein, 10 aa, Artificial Sequence
  Description of Artificial Sequence: Synthetic peptide
EIQKQGQNQW

SEQ ID NO: 6705 - protein, 9 aa, Artificial Sequence
  Description of Artificial Sequence: Synthetic peptide
ETIIRFENL

SEQ ID NO: 6706 - protein, 9 aa, Artificial Sequence
  Description of Artificial Sequence: Synthetic peptide
NVTENFNMW

SEQ ID NO: 6707 - protein, 10 aa, Artificial Sequence
  Description of Artificial Sequence: Synthetic peptide
TTAVPWNSSW

SEQ ID NO: 6708 - protein, 11 aa, Artificial Sequence
  Description of Artificial Sequence: Synthetic peptide
ESIRIGPGQTF

SEQ ID NO: 6709 - protein, 9 aa, Artificial Sequence
  Description of Artificial Sequence: Synthetic peptide
EIIGDIRQA

SEQ ID NO: 6710 - protein, 10 aa, Artificial Sequence
  Description of Artificial Sequence: Synthetic peptide
TTAVHWNSSW

SEQ ID NO: 6711 - protein, 10 aa, Artificial Sequence
  Description of Artificial Sequence: Synthetic peptide
EVNIVTDSQY

SEQ ID NO: 6712 - protein, 10 aa, Artificial Sequence
  Description of Artificial Sequence: Synthetic peptide
EVNIVTDSQY

SEQ ID NO: 6713 - protein, 9 aa, Artificial Sequence
  Description of Artificial Sequence: Synthetic peptide
ETKIGKAGY

SEQ ID NO: 6714 - protein, 9 aa, Artificial Sequence
  Description of Artificial Sequence: Synthetic peptide
EIIGNIRQA

SEQ ID NO: 6715 - protein, 9 aa, Artificial Sequence
  Description of Artificial Sequence: Synthetic peptide
EIIGDIRQA

SEQ ID NO: 6716 - protein, 9 aa, Artificial Sequence
  Description of Artificial Sequence: Synthetic peptide
EVIPMFTAL

SEQ ID NO: 6717 - protein, 9 aa, Artificial Sequence
  Description of Artificial Sequence: Synthetic peptide
ETPGIRYQY

SEQ ID NO: 6718 - protein, 10 aa, Artificial Sequence
  Description of Artificial Sequence: Synthetic peptide
EISNYTNTIY

SEQ ID NO: 6719 - protein, 10 aa, Artificial Sequence
  Description of Artificial Sequence: Synthetic peptide
ETIDKELPLT

SEQ ID NO: 6720 - protein, 10 aa, Artificial Sequence
  Description of Artificial Sequence: Synthetic peptide
EVIPAETGQE

SEQ ID NO: 6721 - protein, 10 aa, Artificial Sequence
  Description of Artificial Sequence: Synthetic peptide
EINNYTNTIY

SEQ ID NO: 6722 - protein, 9 aa, Artificial Sequence
  Description of Artificial Sequence: Synthetic peptide
ETKKGKAGY

SEQ ID NO: 6723 - protein, 10 aa, Artificial Sequence
  Description of Artificial Sequence: Synthetic peptide
EIFRPGGGNM

SEQ ID NO: 6724 - protein, 9 aa, Artificial Sequence
  Description of Artificial Sequence: Synthetic peptide
ETGQETAYY

SEQ ID NO: 6725 - protein, 9 aa, Artificial Sequence
  Description of Artificial Sequence: Synthetic peptide
DIIGDIRQA

SEQ ID NO: 6726 - protein, 10 aa, Artificial Sequence
  Description of Artificial Sequence: Synthetic peptide
ETFRPGGGDM

SEQ ID NO: 6727 - protein, 9 aa, Artificial Sequence
  Description of Artificial Sequence: Synthetic peptide
QTKGLGISY

SEQ ID NO: 6728 - protein, 9 aa, Artificial Sequence
  Description of Artificial Sequence: Synthetic peptide
EVIPAETGQ

SEQ ID NO: 6729 - protein, 9 aa, Artificial Sequence
  Description of Artificial Sequence: Synthetic peptide
EVIPMFTAL

SEQ ID NO: 6730 - protein, 9 aa, Artificial Sequence
  Description of Artificial Sequence: Synthetic peptide
DIAGTTSNL

SEQ ID NO: 6731 - protein, 10 aa, Artificial Sequence
  Description of Artificial Sequence: Synthetic peptide
EVNIVTDSQY

SEQ ID NO: 6732 - protein, 10 aa, Artificial Sequence
  Description of Artificial Sequence: Synthetic peptide
SISERILSTF

SEQ ID NO: 6733 - protein, 10 aa, Artificial Sequence
  Description of Artificial Sequence: Synthetic peptide
EIFRPGGGNM

SEQ ID NO: 6734 - protein, 9 aa, Artificial Sequence
  Description of Artificial Sequence: Synthetic peptide
DIAGTTSTL

SEQ ID NO: 6735 - protein, 9 aa, Artificial Sequence
  Description of Artificial Sequence: Synthetic peptide
EIIGNIRQA

SEQ ID NO: 6736 - protein, 9 aa, Artificial Sequence
  Description of Artificial Sequence: Synthetic peptide
EIIGDIRQA

SEQ ID NO: 6737 - protein, 9 aa, Artificial Sequence
  Description of Artificial Sequence: Synthetic peptide
EPIAGVETF

SEQ ID NO: 6738 - protein, 11 aa, Artificial Sequence
  Description of Artificial Sequence: Synthetic peptide
SIAEGETIIRF

SEQ ID NO: 6739 - protein, 10 aa, Artificial Sequence
  Description of Artificial Sequence: Synthetic peptide
ETGAERQGTF

SEQ ID NO: 6740 - protein, 9 aa, Artificial Sequence
  Description of Artificial Sequence: Synthetic peptide
EIIGNIRQA

SEQ ID NO: 6741 - protein, 9 aa, Artificial Sequence
  Description of Artificial Sequence: Synthetic peptide
EVIPMFTAL

SEQ ID NO: 6742 - protein, 9 aa, Artificial Sequence
  Description of Artificial Sequence: Synthetic peptide
EIIGDIRQA

SEQ ID NO: 6743 - protein, 9 aa, Artificial Sequence
  Description of Artificial Sequence: Synthetic peptide
MVHQPISAR

SEQ ID NO: 6744 - protein, 9 aa, Artificial Sequence
  Description of Artificial Sequence: Synthetic peptide
DIIGDIRQA

SEQ ID NO: 6745 - protein, 9 aa, Artificial Sequence
  Description of Artificial Sequence: Synthetic peptide
ESVEITCTR

SEQ ID NO: 6746 - protein, 9 aa, Artificial Sequence
  Description of Artificial Sequence: Synthetic peptide
DIAGTTSNL

SEQ ID NO: 6747 - protein, 9 aa, Artificial Sequence
  Description of Artificial Sequence: Synthetic peptide
GVAPTTAKR

SEQ ID NO: 6748 - protein, 10 aa, Artificial Sequence
  Description of Artificial Sequence: Synthetic peptide
EIFRPGGGNM

SEQ ID NO: 6749 - protein, 9 aa, Artificial Sequence
  Description of Artificial Sequence: Synthetic peptide
ETLQNVSKK

SEQ ID NO: 6750 - protein, 10 aa, Artificial Sequence
  Description of Artificial Sequence: Synthetic peptide
EVTTHSFNCR

SEQ ID NO: 6751 - protein, 9 aa, Artificial Sequence
  Description of Artificial Sequence: Synthetic peptide
MVHQAISPR

SEQ ID NO: 6752 - protein, 9 aa, Artificial Sequence
  Description of Artificial Sequence: Synthetic peptide
MVHQPLSPR

SEQ ID NO: 6753 - protein, 9 aa, Artificial Sequence
  Description of Artificial Sequence: Synthetic peptide
ETIIRFENL

SEQ ID NO: 6754 - protein, 9 aa, Artificial Sequence
  Description of Artificial Sequence: Synthetic peptide
DIAGTTSTL

SEQ ID NO: 6755 - protein, 9 aa, Artificial Sequence
  Description of Artificial Sequence: Synthetic peptide
ESVEINCTR

SEQ ID NO: 6756 - protein, 11 aa, Artificial Sequence
  Description of Artificial Sequence: Synthetic peptide
ETFYVDGASNR

SEQ ID NO: 6757 - protein, 10 aa, Artificial Sequence
  Description of Artificial Sequence: Synthetic peptide
DNSDIKVVPR

SEQ ID NO: 6758 - protein, 10 aa, Artificial Sequence
  Description of Artificial Sequence: Synthetic peptide
QMVHQPISAR

SEQ ID NO: 6759 - protein, 9 aa, Artificial Sequence
  Description of Artificial Sequence: Synthetic peptide
ETIDKELPL

SEQ ID NO: 6760 - protein, 9 aa, Artificial Sequence
  Description of Artificial Sequence: Synthetic peptide
LFNTVATLY

SEQ ID NO: 6761 - protein, 9 aa, Artificial Sequence
  Description of Artificial Sequence: Synthetic peptide
TVLDVGDAY

SEQ ID NO: 6762 - protein, 10 aa, Artificial Sequence
  Description of Artificial Sequence: Synthetic peptide
VTFDPIPIHY

SEQ ID NO: 6763 - protein, 9 aa, Artificial Sequence
  Description of Artificial Sequence: Synthetic peptide
SLDPIPIHY

SEQ ID NO: 6764 - protein, 9 aa, Artificial Sequence
  Description of Artificial Sequence: Synthetic peptide
LFNTIAVLY

SEQ ID NO: 6765 - protein, 9 aa, Artificial Sequence
  Description of Artificial Sequence: Synthetic peptide
SFDPIPIHY

SEQ ID NO: 6766 - protein, 9 aa, Artificial Sequence
  Description of Artificial Sequence: Synthetic peptide
TFDPIPIHY

SEQ ID NO: 6767 - protein, 10 aa, Artificial Sequence
  Description of Artificial Sequence: Synthetic peptide
VSFDPIPIHY

SEQ ID NO: 6768 - protein, 9 aa, Artificial Sequence
  Description of Artificial Sequence: Synthetic peptide
QTGWQALKY

SEQ ID NO: 6769 - protein, 9 aa, Artificial Sequence
  Description of Artificial Sequence: Synthetic peptide
LFNTVATLY

SEQ ID NO: 6770 - protein, 9 aa, Artificial Sequence
  Description of Artificial Sequence: Synthetic peptide
GFFPDWQNY

SEQ ID NO: 6771 - protein, 9 aa, Artificial Sequence
  Description of Artificial Sequence: Synthetic peptide
LFNTIAVLY

SEQ ID NO: 6772 - protein, 10 aa, Artificial Sequence
  Description of Artificial Sequence: Synthetic peptide
VTFDPIPIHY

SEQ ID NO: 6773 - protein, 9 aa, Artificial Sequence
  Description of Artificial Sequence: Synthetic peptide
SFDPIPIHY

SEQ ID NO: 6774 - protein, 9 aa, Artificial Sequence
  Description of Artificial Sequence: Synthetic peptide
QTGWQALKY

SEQ ID NO: 6775 - protein, 9 aa, Artificial Sequence
  Description of Artificial Sequence: Synthetic peptide
TFDPIPIHY

SEQ ID NO: 6776 - protein, 9 aa, Artificial Sequence
  Description of Artificial Sequence: Synthetic peptide
GYFPDWQNY

SEQ ID NO: 6777 - protein, 10 aa, Artificial Sequence
  Description of Artificial Sequence: Synthetic peptide
VSFDPIPIHY

SEQ ID NO: 6778 - protein, 9 aa, Artificial Sequence
  Description of Artificial Sequence: Synthetic peptide
SLDPIPIHY

SEQ ID NO: 6779 - protein, 10 aa, Artificial Sequence
  Description of Artificial Sequence: Synthetic peptide
VSLDPIPIHY

SEQ ID NO: 6780 - protein, 9 aa, Artificial Sequence
  Description of Artificial Sequence: Synthetic peptide
VWTIVYIEY

SEQ ID NO: 6781 - protein, 9 aa, Artificial Sequence
  Description of Artificial Sequence: Synthetic peptide
GNLWVTVYY

SEQ ID NO: 6782 - protein, 9 aa, Artificial Sequence
  Description of Artificial Sequence: Synthetic peptide
VWIIVYIEY

SEQ ID NO: 6783 - protein, 9 aa, Artificial Sequence
  Description of Artificial Sequence: Synthetic peptide
TVLDVGDAY

SEQ ID NO: 6784 - protein, 9 aa, Artificial Sequence
  Description of Artificial Sequence: Synthetic peptide
SFLYASVDY

SEQ ID NO: 6785 - protein, 9 aa, Artificial Sequence
  Description of Artificial Sequence: Synthetic peptide
TEAVQKIAL

SEQ ID NO: 6786 - protein, 9 aa, Artificial Sequence
  Description of Artificial Sequence: Synthetic peptide
TERVGNPVF

SEQ ID NO: 6787 - protein, 9 aa, Artificial Sequence
  Description of Artificial Sequence: Synthetic peptide
SEFNLPPIV

SEQ ID NO: 6788 - protein, 9 aa, Artificial Sequence
  Description of Artificial Sequence: Synthetic peptide
KAKPPLPSV

SEQ ID NO: 6789 - protein, 9 aa, Artificial Sequence
  Description of Artificial Sequence: Synthetic peptide
NEFNIPPVV

SEQ ID NO: 6790 - protein, 9 aa, Artificial Sequence
  Description of Artificial Sequence: Synthetic peptide
KIKPPLPSV

SEQ ID NO: 6791 - protein, 9 aa, Artificial Sequence
  Description of Artificial Sequence: Synthetic peptide
KIKPPLPSI

SEQ ID NO: 6792 - protein, 9 aa, Artificial Sequence
  Description of Artificial Sequence: Synthetic peptide
QIYPGIQVK

SEQ ID NO: 6793 - protein, 9 aa, Artificial Sequence
  Description of Artificial Sequence: Synthetic peptide
LEKEPIAGV

SEQ ID NO: 6794 - protein, 9 aa, Artificial Sequence
  Description of Artificial Sequence: Synthetic peptide
QTKGLGISY

SEQ ID NO: 6795 - protein, 11 aa, Artificial Sequence
  Description of Artificial Sequence: Synthetic peptide
AQNPEIVIYQY

SEQ ID NO: 6796 - protein, 11 aa, Artificial Sequence
  Description of Artificial Sequence: Synthetic peptide
AQNPEIIIYQY

SEQ ID NO: 6797 - protein, 9 aa, Artificial Sequence
  Description of Artificial Sequence: Synthetic peptide
QAKGLGISY

SEQ ID NO: 6798 - protein, 9 aa, Artificial Sequence
  Description of Artificial Sequence: Synthetic peptide
TVLDVGDAY

SEQ ID NO: 6799 - protein, 9 aa, Artificial Sequence
  Description of Artificial Sequence: Synthetic peptide
AQNPEIVIY

SEQ ID NO: 6800 - protein, 9 aa, Artificial Sequence
  Description of Artificial Sequence: Synthetic peptide
KAQEEHERY

SEQ ID NO: 6801 - protein, 9 aa, Artificial Sequence
  Description of Artificial Sequence: Synthetic peptide
LGQHIYETY

SEQ ID NO: 6802 - protein, 10 aa, Artificial Sequence
  Description of Artificial Sequence: Synthetic peptide
ILKEPVHGVY

SEQ ID NO: 6803 - protein, 9 aa, Artificial Sequence
  Description of Artificial Sequence: Synthetic peptide
TSSLFNSTY

SEQ ID NO: 6804 - protein, 9 aa, Artificial Sequence
  Description of Artificial Sequence: Synthetic peptide
AQNPEIIIY

SEQ ID NO: 6805 - protein, 9 aa, Artificial Sequence
  Description of Artificial Sequence: Synthetic peptide
ISNYTNTIY

SEQ ID NO: 6806 - protein, 9 aa, Artificial Sequence
  Description of Artificial Sequence: Synthetic peptide
KAQEEHEKY

SEQ ID NO: 6807 - protein, 9 aa, Artificial Sequence
  Description of Artificial Sequence: Synthetic peptide
RIGPGQAFY

SEQ ID NO: 6808 - protein, 9 aa, Artificial Sequence
  Description of Artificial Sequence: Synthetic peptide
QTKGLGISY

SEQ ID NO: 6809 - protein, 11 aa, Artificial Sequence
  Description of Artificial Sequence: Synthetic peptide
AQNPEIVIYQY

SEQ ID NO: 6810 - protein, 11 aa, Artificial Sequence
  Description of Artificial Sequence: Synthetic peptide
AQNPEIIIYQY

SEQ ID NO: 6811 - protein, 10 aa, Artificial Sequence
  Description of Artificial Sequence: Synthetic peptide
FQAKGLGISY

SEQ ID NO: 6812 - protein, 10 aa, Artificial Sequence
  Description of Artificial Sequence: Synthetic peptide
FQKKGLGISY

SEQ ID NO: 6813 - protein, 9 aa, Artificial Sequence
  Description of Artificial Sequence: Synthetic peptide
KQGQNQWTY

SEQ ID NO: 6814 - protein, 9 aa, Artificial Sequence
  Description of Artificial Sequence: Synthetic peptide
RIGPGQAFY

SEQ ID NO: 6815 - protein, 9 aa, Artificial Sequence
  Description of Artificial Sequence: Synthetic peptide
AQNPEIVIY

SEQ ID NO: 6816 - protein, 9 aa, Artificial Sequence
  Description of Artificial Sequence: Synthetic peptide
RIGPGQTFY

SEQ ID NO: 6817 - protein, 9 aa, Artificial Sequence
  Description of Artificial Sequence: Synthetic peptide
TSSLFNSTY

SEQ ID NO: 6818 - protein, 11 aa, Artificial Sequence
  Description of Artificial Sequence: Synthetic peptide
RGRPGNLLQNR

SEQ ID NO: 6819 - protein, 10 aa, Artificial Sequence
  Description of Artificial Sequence: Synthetic peptide
QTNSAILMQR

SEQ ID NO: 6820 - protein, 11 aa, Artificial Sequence
  Description of Artificial Sequence: Synthetic peptide
KVNNTNIMMQR

SEQ ID NO: 6821 - protein, 9 aa, Artificial Sequence
  Description of Artificial Sequence: Synthetic peptide
QTRVLAIER

SEQ ID NO: 6822 - protein, 11 aa, Artificial Sequence
  Description of Artificial Sequence: Synthetic peptide
KGRPGNFLQNR

SEQ ID NO: 6823 - protein, 9 aa, Artificial Sequence
  Description of Artificial Sequence: Synthetic peptide
KSVAIVCTR

SEQ ID NO: 6824 - protein, 11 aa, Artificial Sequence
  Description of Artificial Sequence: Synthetic peptide
QINNGNIMMQR

SEQ ID NO: 6825 - protein, 9 aa, Artificial Sequence
  Description of Artificial Sequence: Synthetic peptide
QSNPYPEPR

SEQ ID NO: 6826 - protein, 9 aa, Artificial Sequence
  Description of Artificial Sequence: Synthetic peptide
MVHQPISAR

SEQ ID NO: 6827 - protein, 11 aa, Artificial Sequence
  Description of Artificial Sequence: Synthetic peptide
QTKGLGISYGR

SEQ ID NO: 6828 - protein, 9 aa, Artificial Sequence
  Description of Artificial Sequence: Synthetic peptide
QIYPGIKVR

SEQ ID NO: 6829 - protein, 9 aa, Artificial Sequence
  Description of Artificial Sequence: Synthetic peptide
RVGNPVFGR

SEQ ID NO: 6830 - protein, 11 aa, Artificial Sequence
  Description of Artificial Sequence: Synthetic peptide
RSNITGLLLTR

SEQ ID NO: 6831 - protein, 11 aa, Artificial Sequence
  Description of Artificial Sequence: Synthetic peptide
TVNDIQKLVGK

SEQ ID NO: 6832 - protein, 9 aa, Artificial Sequence
  Description of Artificial Sequence: Synthetic peptide
KGLGISYGR

SEQ ID NO: 6833 - protein, 11 aa, Artificial Sequence
  Description of Artificial Sequence: Synthetic peptide
KGRPGNFLQSR

SEQ ID NO: 6834 - protein, 11 aa, Artificial Sequence
  Description of Artificial Sequence: Synthetic peptide
SQTNSAILMQR

SEQ ID NO: 6835 - protein, 9 aa, Artificial Sequence
  Description of Artificial Sequence: Synthetic peptide
VGRPAIRER

SEQ ID NO: 6836 - protein, 9 aa, Artificial Sequence
  Description of Artificial Sequence: Synthetic peptide
RILSTCVGR

SEQ ID NO: 6837 - protein, 11 aa, Artificial Sequence
  Description of Artificial Sequence: Synthetic peptide
KTQKVNALFYR

SEQ ID NO: 6838 - protein, 9 aa, Artificial Sequence
  Description of Artificial Sequence: Synthetic peptide
RQIHSISER

SEQ ID NO: 6839 - protein, 10 aa, Artificial Sequence
  Description of Artificial Sequence: Synthetic peptide
ISKQPLSHTR

SEQ ID NO: 6840 - protein, 9 aa, Artificial Sequence
  Description of Artificial Sequence: Synthetic peptide
MVHQPLSPR

SEQ ID NO: 6841 - protein, 9 aa, Artificial Sequence
  Description of Artificial Sequence: Synthetic peptide
VGWPAIRER

SEQ ID NO: 6842 - protein, 8 aa, Artificial Sequence
  Description of Artificial Sequence: Synthetic peptide
AVLSIVNR

SEQ ID NO: 6843 - protein, 11 aa, Artificial Sequence
  Description of Artificial Sequence: Synthetic peptide
VGPTPVNIIGR

SEQ ID NO: 6844 - protein, 8 aa, Artificial Sequence
  Description of Artificial Sequence: Synthetic peptide
AVISIVNR

SEQ ID NO: 6845 - protein, 8 aa, Artificial Sequence
  Description of Artificial Sequence: Synthetic peptide
NTNIMMQR

SEQ ID NO: 6846 - protein, 9 aa, Artificial Sequence
  Description of Artificial Sequence: Synthetic peptide
VQNFRVYYR

SEQ ID NO: 6847 - protein, 9 aa, Artificial Sequence
  Description of Artificial Sequence: Synthetic peptide
IVNRVRQGY

SEQ ID NO: 6848 - protein, 9 aa, Artificial Sequence
  Description of Artificial Sequence: Synthetic peptide
KQITKVQNF

SEQ ID NO: 6849 - protein, 9 aa, Artificial Sequence
  Description of Artificial Sequence: Synthetic peptide
QTKGLGISY

SEQ ID NO: 6850 - protein, 9 aa, Artificial Sequence
  Description of Artificial Sequence: Synthetic peptide
IQKQGQNQW

SEQ ID NO: 6851 - protein, 9 aa, Artificial Sequence
  Description of Artificial Sequence: Synthetic peptide
DSNSSGYYR

SEQ ID NO: 6852 - protein, 9 aa, Artificial Sequence
  Description of Artificial Sequence: Synthetic peptide
MVHQPISAR

SEQ ID NO: 6853 - protein, 9 aa, Artificial Sequence
  Description of Artificial Sequence: Synthetic peptide
NNTNIMMQR

SEQ ID NO: 6854 - protein, 9 aa, Artificial Sequence
  Description of Artificial Sequence: Synthetic peptide
NNYTNTIYR

SEQ ID NO: 6855 - protein, 11 aa, Artificial Sequence
  Description of Artificial Sequence: Synthetic peptide
ETFYVDGASNR

SEQ ID NO: 6856 - protein, 9 aa, Artificial Sequence
  Description of Artificial Sequence: Synthetic peptide
EYRKLVQQR

SEQ ID NO: 6857 - protein, 11 aa, Artificial Sequence
  Description of Artificial Sequence: Synthetic peptide
ETFYVDGAANR

SEQ ID NO: 6858 - protein, 10 aa, Artificial Sequence
  Description of Artificial Sequence: Synthetic peptide
DNSDIKVVPR

SEQ ID NO: 6859 - protein, 9 aa, Artificial Sequence
  Description of Artificial Sequence: Synthetic peptide
DAWEKIKLR

SEQ ID NO: 6860 - protein, 9 aa, Artificial Sequence
  Description of Artificial Sequence: Synthetic peptide
NNGNIMMQR

SEQ ID NO: 6861 - protein, 10 aa, Artificial Sequence
  Description of Artificial Sequence: Synthetic peptide
INNGNIMMQR

SEQ ID NO: 6862 - protein, 11 aa, Artificial Sequence
  Description of Artificial Sequence: Synthetic peptide
EAREFSPEQTR

SEQ ID NO: 6863 - protein, 9 aa, Artificial Sequence
  Description of Artificial Sequence: Synthetic peptide
MVHQPLSPR

SEQ ID NO: 6864 - protein, 10 aa, Artificial Sequence
  Description of Artificial Sequence: Synthetic peptide
VNNTNIMMQR

SEQ ID NO: 6865 - protein, 10 aa, Artificial Sequence
  Description of Artificial Sequence: Synthetic peptide
QTNSAILMQR

SEQ ID NO: 6866 - protein, 9 aa, Artificial Sequence
  Description of Artificial Sequence: Synthetic peptide
DSQLAHKHR

SEQ ID NO: 6867 - protein, 11 aa, Artificial Sequence
  Description of Artificial Sequence: Synthetic peptide
EINNYTNTIYR

SEQ ID NO: 6868 - protein, 9 aa, Artificial Sequence
  Description of Artificial Sequence: Synthetic peptide
QTRVLAIER

SEQ ID NO: 6869 - protein, 11 aa, Artificial Sequence
  Description of Artificial Sequence: Synthetic peptide
ETLAFQQGKAR

SEQ ID NO: 6870 - protein, 9 aa, Artificial Sequence
  Description of Artificial Sequence: Synthetic peptide
SNYTNTIYR

SEQ ID NO: 6871 - protein, 9 aa, Artificial Sequence
  Description of Artificial Sequence: Synthetic peptide
TNSAILMQR

SEQ ID NO: 6872 - protein, 11 aa, Artificial Sequence
  Description of Artificial Sequence: Synthetic peptide
DVKQLTEAVQK

SEQ ID NO: 6873 - protein, 10 aa, Artificial Sequence
  Description of Artificial Sequence: Synthetic peptide
EAREFPPETR

SEQ ID NO: 6874 - protein, 9 aa, Artificial Sequence
  Description of Artificial Sequence: Synthetic peptide
ESVEITCTR

SEQ ID NO: 6875 - protein, 11 aa, Artificial Sequence
  Description of Artificial Sequence: Synthetic peptide
DVKQLTAVVQK

SEQ ID NO: 6876 - protein, 11 aa, Artificial Sequence
  Description of Artificial Sequence: Synthetic peptide
DVRQLTEAVQK

SEQ ID NO: 6877 - protein, 11 aa, Artificial Sequence
  Description of Artificial Sequence: Synthetic peptide
KVNNTNIMMQR

SEQ ID NO: 6878 - protein, 9 aa, Artificial Sequence
  Description of Artificial Sequence: Synthetic peptide
CNTSGLFNR

SEQ ID NO: 6879 - protein, 9 aa, Artificial Sequence
  Description of Artificial Sequence: Synthetic peptide
MVHQAISPR

SEQ ID NO: 6880 - protein, 9 aa, Artificial Sequence
  Description of Artificial Sequence: Synthetic peptide
DTWEKIRLR

SEQ ID NO: 6881 - protein, 9 aa, Artificial Sequence
  Description of Artificial Sequence: Synthetic peptide
MVHQPISAR

SEQ ID NO: 6882 - protein, 9 aa, Artificial Sequence
  Description of Artificial Sequence: Synthetic peptide
EYRKLVQQR

SEQ ID NO: 6883 - protein, 11 aa, Artificial Sequence
  Description of Artificial Sequence: Synthetic peptide
ETFYVDGASNR

SEQ ID NO: 6884 - protein, 11 aa, Artificial Sequence
  Description of Artificial Sequence: Synthetic peptide
ETFYVDGAANR

SEQ ID NO: 6885 - protein, 9 aa, Artificial Sequence
  Description of Artificial Sequence: Synthetic peptide
DSNSSGYYR

SEQ ID NO: 6886 - protein, 10 aa, Artificial Sequence
  Description of Artificial Sequence: Synthetic peptide
QTNSAILMQR

SEQ ID NO: 6887 - protein, 9 aa, Artificial Sequence
  Description of Artificial Sequence: Synthetic peptide
ESVEITCTR

SEQ ID NO: 6888 - protein, 9 aa, Artificial Sequence
  Description of Artificial Sequence: Synthetic peptide
MVHQPLSPR

SEQ ID NO: 6889 - protein, 9 aa, Artificial Sequence
  Description of Artificial Sequence: Synthetic peptide
ESVEINCTR

SEQ ID NO: 6890 - protein, 11 aa, Artificial Sequence
  Description of Artificial Sequence: Synthetic peptide
ETLAFQQGKAR

SEQ ID NO: 6891 - protein, 9 aa, Artificial Sequence
  Description of Artificial Sequence: Synthetic peptide
NNTNIMMQR

SEQ ID NO: 6892 - protein, 9 aa, Artificial Sequence
  Description of Artificial Sequence: Synthetic peptide
TNSAILMQR

SEQ ID NO: 6893 - protein, 9 aa, Artificial Sequence
  Description of Artificial Sequence: Synthetic peptide
QTRVLAIER

SEQ ID NO: 6894 - protein, 11 aa, Artificial Sequence
  Description of Artificial Sequence: Synthetic peptide
EAREFSPEQTR

SEQ ID NO: 6895 - protein, 9 aa, Artificial Sequence
  Description of Artificial Sequence: Synthetic peptide
MVHQAISPR

SEQ ID NO: 6896 - protein, 10 aa, Artificial Sequence
  Description of Artificial Sequence: Synthetic peptide
YTNEIIGNIR

SEQ ID NO: 6897 - protein, 9 aa, Artificial Sequence
  Description of Artificial Sequence: Synthetic peptide
NNYTNTIYR

SEQ ID NO: 6898 - protein, 9 aa, Artificial Sequence
  Description of Artificial Sequence: Synthetic peptide
NNGNIMMQR

SEQ ID NO: 6899 - protein, 10 aa, Artificial Sequence
  Description of Artificial Sequence: Synthetic peptide
DNSDIKVVPR

SEQ ID NO: 6900 - protein, 11 aa, Artificial Sequence
  Description of Artificial Sequence: Synthetic peptide
EINNYTNTIYR

SEQ ID NO: 6901 - protein, 9 aa, Artificial Sequence
  Description of Artificial Sequence: Synthetic peptide
ETNKTETFR

SEQ ID NO: 6902 - protein, 9 aa, Artificial Sequence
  Description of Artificial Sequence: Synthetic peptide
SNYTNTIYR

SEQ ID NO: 6903 - protein, 9 aa, Artificial Sequence
  Description of Artificial Sequence: Synthetic peptide
FYVDGASNR

SEQ ID NO: 6904 - protein, 10 aa, Artificial Sequence
  Description of Artificial Sequence: Synthetic peptide
EAREFPPETR

SEQ ID NO: 6905 - protein, 8 aa, Artificial Sequence
  Description of Artificial Sequence: Synthetic peptide
NTNIMMQR

SEQ ID NO: 6906 - protein, 9 aa, Artificial Sequence
  Description of Artificial Sequence: Synthetic peptide
FYVDGAANR

SEQ ID NO: 6907 - protein, 10 aa, Artificial Sequence
  Description of Artificial Sequence: Synthetic peptide
ETMVDMGHLR

SEQ ID NO: 6908 - protein, 11 aa, Artificial Sequence
  Description of Artificial Sequence: Synthetic peptide
TVNDIQKLVGK

SEQ ID NO: 6909 - protein, 9 aa, Artificial Sequence
  Description of Artificial Sequence: Synthetic peptide
ETLQNVSKK

SEQ ID NO: 6910 - protein, 10 aa, Artificial Sequence
  Description of Artificial Sequence: Synthetic peptide
INNGNIMMQR

SEQ ID NO: 6911 - protein, 9 aa, Artificial Sequence
  Description of Artificial Sequence: Synthetic peptide
EYRKLVRQR

SEQ ID NO: 6912 - protein, 9 aa, Artificial Sequence
  Description of Artificial Sequence: Synthetic peptide
QARVLAIER

SEQ ID NO: 6913 - protein, 10 aa, Artificial Sequence
  Description of Artificial Sequence: Synthetic peptide
EVHIPLGEAR

SEQ ID NO: 6914 - protein, 9 aa, Artificial Sequence
  Description of Artificial Sequence: Synthetic peptide
QSNPYPEPR

SEQ ID NO: 6915 - protein, 9 aa, Artificial Sequence
  Description of Artificial Sequence: Synthetic peptide
NSDIKVVPR

SEQ ID NO: 6916 - protein, 9 aa, Artificial Sequence
  Description of Artificial Sequence: Synthetic peptide
QIYPGIKVR

SEQ ID NO: 6917 - protein, 9 aa, Artificial Sequence
  Description of Artificial Sequence: Synthetic peptide
EAIIRILQR

SEQ ID NO: 6918 - protein, 9 aa, Artificial Sequence
  Description of Artificial Sequence: Synthetic peptide
ETLAFQQGK

SEQ ID NO: 6919 - protein, 8 aa, Artificial Sequence
  Description of Artificial Sequence: Synthetic peptide
NTSGLFNR

SEQ ID NO: 6920 - protein, 10 aa, Artificial Sequence
  Description of Artificial Sequence: Synthetic peptide
EVTTHSFNCR

SEQ ID NO: 6921 - protein, 10 aa, Artificial Sequence
  Description of Artificial Sequence: Synthetic peptide
ELKKIIGQVR

SEQ ID NO: 6922 - protein, 10 aa, Artificial Sequence
  Description of Artificial Sequence: Synthetic peptide
EFNLPPIVAK

SEQ ID NO: 6923 - protein, 10 aa, Artificial Sequence
  Description of Artificial Sequence: Synthetic peptide
ISKQPLSHTR

SEQ ID NO: 6924 - protein, 11 aa, Artificial Sequence
  Description of Artificial Sequence: Synthetic peptide
ETFRPGGGDMR

SEQ ID NO: 6925 - protein, 9 aa, Artificial Sequence
  Description of Artificial Sequence: Synthetic peptide
MYAPPIEGK

SEQ ID NO: 6926 - protein, 9 aa, Artificial Sequence
  Description of Artificial Sequence: Synthetic peptide
DAWEKIKLR

SEQ ID NO: 6927 - protein, 11 aa, Artificial Sequence
  Description of Artificial Sequence: Synthetic peptide
EISNYTNTIYR

SEQ ID NO: 6928 - protein, 10 aa, Artificial Sequence
  Description of Artificial Sequence: Synthetic peptide
VNNTNIMMQR

SEQ ID NO: 6929 - protein, 9 aa, Artificial Sequence
  Description of Artificial Sequence: Synthetic peptide
FNLPPIVAK

SEQ ID NO: 6930 - protein, 10 aa, Artificial Sequence
  Description of Artificial Sequence: Synthetic peptide
EIFRPGGGNM

SEQ ID NO: 6931 - protein, 10 aa, Artificial Sequence
  Description of Artificial Sequence: Synthetic peptide
NTFSEAGAER

SEQ ID NO: 6932 - protein, 8 aa, Artificial Sequence
  Description of Artificial Sequence: Synthetic peptide
DFILIAGR

SEQ ID NO: 6933 - protein, 9 aa, Artificial Sequence
  Description of Artificial Sequence: Synthetic peptide
TNEIIGNIR

SEQ ID NO: 6934 - protein, 9 aa, Artificial Sequence
  Description of Artificial Sequence: Synthetic peptide
CNTSGLFNR

SEQ ID NO: 6935 - protein, 8 aa, Artificial Sequence
  Description of Artificial Sequence: Synthetic peptide
QTLIPHPR

SEQ ID NO: 6936 - protein, 11 aa, Artificial Sequence
  Description of Artificial Sequence: Synthetic peptide
ETFYVDGASNR

SEQ ID NO: 6937 - protein, 11 aa, Artificial Sequence
  Description of Artificial Sequence: Synthetic peptide
ETFYVDGAANR

SEQ ID NO: 6938 - protein, 9 aa, Artificial Sequence
  Description of Artificial Sequence: Synthetic peptide
ESVEITCTR

SEQ ID NO: 6939 - protein, 9 aa, Artificial Sequence
  Description of Artificial Sequence: Synthetic peptide
ESVEINCTR

SEQ ID NO: 6940 - protein, 10 aa, Artificial Sequence
  Description of Artificial Sequence: Synthetic peptide
QTNSAILMQR

SEQ ID NO: 6941 - protein, 10 aa, Artificial Sequence
  Description of Artificial Sequence: Synthetic peptide
NTFSEAGAER

SEQ ID NO: 6942 - protein, 10 aa, Artificial Sequence
  Description of Artificial Sequence: Synthetic peptide
DNSDIKVVPR

SEQ ID NO: 6943 - protein, 9 aa, Artificial Sequence
  Description of Artificial Sequence: Synthetic peptide
DSNSSGYYR

SEQ ID NO: 6944 - protein, 9 aa, Artificial Sequence
  Description of Artificial Sequence: Synthetic peptide
MVHQPISAR

SEQ ID NO: 6945 - protein, 9 aa, Artificial Sequence
  Description of Artificial Sequence: Synthetic peptide
TNSAILMQR

SEQ ID NO: 6946 - protein, 11 aa, Artificial Sequence
  Description of Artificial Sequence: Synthetic peptide
EISNYTNTIYR

SEQ ID NO: 6947 - protein, 11 aa, Artificial Sequence
  Description of Artificial Sequence: Synthetic peptide
TVNDIQKLVGK

SEQ ID NO: 6948 - protein, 11 aa, Artificial Sequence
  Description of Artificial Sequence: Synthetic peptide
ETFRPGGGDMR

SEQ ID NO: 6949 - protein, 9 aa, Artificial Sequence
  Description of Artificial Sequence: Synthetic peptide
NNTNIMMQR

SEQ ID NO: 6950 - protein, 10 aa, Artificial Sequence
  Description of Artificial Sequence: Synthetic peptide
YTNEIIGNIR

SEQ ID NO: 6951 - protein, 9 aa, Artificial Sequence
  Description of Artificial Sequence: Synthetic peptide
GVAPTTAKR

SEQ ID NO: 6952 - protein, 9 aa, Artificial Sequence
  Description of Artificial Sequence: Synthetic peptide
NNGNIMMQR

SEQ ID NO: 6953 - protein, 11 aa, Artificial Sequence
  Description of Artificial Sequence: Synthetic peptide
EINNYTNTIYR

SEQ ID NO: 6954 - protein, 10 aa, Artificial Sequence
  Description of Artificial Sequence: Synthetic peptide
EVNIVTDSQY

SEQ ID NO: 6955 - protein, 9 aa, Artificial Sequence
  Description of Artificial Sequence: Synthetic peptide
NSDIKVVPR

SEQ ID NO: 6956 - protein, 10 aa, Artificial Sequence
  Description of Artificial Sequence: Synthetic peptide
ETMVDMGHLR

SEQ ID NO: 6957 - protein, 10 aa, Artificial Sequence
  Description of Artificial Sequence: Synthetic peptide
ASITLTVQVR

SEQ ID NO: 6958 - protein, 11 aa, Artificial Sequence
  Description of Artificial Sequence: Synthetic peptide
EIFRPGGGNMK

SEQ ID NO: 6959 - protein, 9 aa, Artificial Sequence
  Description of Artificial Sequence: Synthetic peptide
ETLAFQQGK

SEQ ID NO: 6960 - protein, 10 aa, Artificial Sequence
  Description of Artificial Sequence: Synthetic peptide
ASITLTVQAR

SEQ ID NO: 6961 - protein, 10 aa, Artificial Sequence
  Description of Artificial Sequence: Synthetic peptide
EGVGSPISGK

SEQ ID NO: 6962 - protein, 9 aa, Artificial Sequence
  Description of Artificial Sequence: Synthetic peptide
ETLQNVSKK

SEQ ID NO: 6963 - protein, 11 aa, Artificial Sequence
  Description of Artificial Sequence: Synthetic peptide
DVKQLTEAVQK

SEQ ID NO: 6964 - protein, 9 aa, Artificial Sequence
  Description of Artificial Sequence: Synthetic peptide
SNYTNTIYR

SEQ ID NO: 6965 - protein, 9 aa, Artificial Sequence
  Description of Artificial Sequence: Synthetic peptide
NNYTNTIYR

SEQ ID NO: 6966 - protein, 9 aa, Artificial Sequence
  Description of Artificial Sequence: Synthetic peptide
FAVLSIVNR

SEQ ID NO: 6967 - protein, 10 aa, Artificial Sequence
  Description of Artificial Sequence: Synthetic peptide
ATGDIIGDIR

SEQ ID NO: 6968 - protein, 10 aa, Artificial Sequence
  Description of Artificial Sequence: Synthetic peptide
ATGEIIGDIR

SEQ ID NO: 6969 - protein, 9 aa, Artificial Sequence
  Description of Artificial Sequence: Synthetic peptide
FAVISIVNR

SEQ ID NO: 6970 - protein, 9 aa, Artificial Sequence
  Description of Artificial Sequence: Synthetic peptide
NITGLLLTR

SEQ ID NO: 6971 - protein, 10 aa, Artificial Sequence
  Description of Artificial Sequence: Synthetic peptide
SLAEGGIIIR

SEQ ID NO: 6972 - protein, 10 aa, Artificial Sequence
  Description of Artificial Sequence: Synthetic peptide
STMVDMGNLR

SEQ ID NO: 6973 - protein, 9 aa, Artificial Sequence
  Description of Artificial Sequence: Synthetic peptide
MVHQAISPR

SEQ ID NO: 6974 - protein, 9 aa, Artificial Sequence
  Description of Artificial Sequence: Synthetic peptide
SITLTVQVR

SEQ ID NO: 6975 - protein, 10 aa, Artificial Sequence
  Description of Artificial Sequence: Synthetic peptide
DIIATDIQTK

SEQ ID NO: 6976 - protein, 10 aa, Artificial Sequence
  Description of Artificial Sequence: Synthetic peptide
DCFADSAIRK

SEQ ID NO: 6977 - protein, 9 aa, Artificial Sequence
  Description of Artificial Sequence: Synthetic peptide
MVHQPLSPR

SEQ ID NO: 6978 - protein, 10 aa, Artificial Sequence
  Description of Artificial Sequence: Synthetic peptide
ELSTMVDMGR

SEQ ID NO: 6979 - protein, 9 aa, Artificial Sequence
  Description of Artificial Sequence: Synthetic peptide
SITGLLLTR

SEQ ID NO: 6980 - protein, 11 aa, Artificial Sequence
  Description of Artificial Sequence: Synthetic peptide
VGPTPVNIIGR

SEQ ID NO: 6981 - protein, 11 aa, Artificial Sequence
  Description of Artificial Sequence: Synthetic peptide
DVKQLTAVVQK

SEQ ID NO: 6982 - protein, 10 aa, Artificial Sequence
  Description of Artificial Sequence: Synthetic peptide
SIAEGETIIR

SEQ ID NO: 6983 - protein, 9 aa, Artificial Sequence
  Description of Artificial Sequence: Synthetic peptide
ETNKTETFR

SEQ ID NO: 6984 - protein, 10 aa, Artificial Sequence
  Description of Artificial Sequence: Synthetic peptide
SSITGLLLTR

SEQ ID NO: 6985 - protein, 10 aa, Artificial Sequence
  Description of Artificial Sequence: Synthetic peptide
EIFRPGGGNM

SEQ ID NO: 6986 - protein, 11 aa, Artificial Sequence
  Description of Artificial Sequence: Synthetic peptide
QVNNTTIMMQK

SEQ ID NO: 6987 - protein, 9 aa, Artificial Sequence
  Description of Artificial Sequence: Synthetic peptide
ETAYFILKL

SEQ ID NO: 6988 - protein, 9 aa, Artificial Sequence
  Description of Artificial Sequence: Synthetic peptide
ETAYFLLKL

SEQ ID NO: 6989 - protein, 9 aa, Artificial Sequence
  Description of Artificial Sequence: Synthetic peptide
ETAYYILKL

SEQ ID NO: 6990 - protein, 9 aa, Artificial Sequence
  Description of Artificial Sequence: Synthetic peptide
AVISIVNRV

SEQ ID NO: 6991 - protein, 9 aa, Artificial Sequence
  Description of Artificial Sequence: Synthetic peptide
ETIIRFENL

SEQ ID NO: 6992 - protein, 9 aa, Artificial Sequence
  Description of Artificial Sequence: Synthetic peptide
NTSAITQAC

SEQ ID NO: 6993 - protein, 9 aa, Artificial Sequence
  Description of Artificial Sequence: Synthetic peptide
TTSNLQEQV

SEQ ID NO: 6994 - protein, 9 aa, Artificial Sequence
  Description of Artificial Sequence: Synthetic peptide
NTIAVLYCV

SEQ ID NO: 6995 - protein, 9 aa, Artificial Sequence
  Description of Artificial Sequence: Synthetic peptide
ELISLHNTV

SEQ ID NO: 6996 - protein, 9 aa, Artificial Sequence
  Description of Artificial Sequence: Synthetic peptide
NTSTITQAC

SEQ ID NO: 6997 - protein, 9 aa, Artificial Sequence
  Description of Artificial Sequence: Synthetic peptide
YTNEIIGNI

SEQ ID NO: 6998 - protein, 10 aa, Artificial Sequence
  Description of Artificial Sequence: Synthetic peptide
ETYGDTWTGV

SEQ ID NO: 6999 - protein, 9 aa, Artificial Sequence
  Description of Artificial Sequence: Synthetic peptide
EVIPMFTAL

SEQ ID NO: 7000 - protein, 9 aa, Artificial Sequence
  Description of Artificial Sequence: Synthetic peptide
TVNDIQKLV

SEQ ID NO: 7001 - protein, 9 aa, Artificial Sequence
  Description of Artificial Sequence: Synthetic peptide
EVTTHSFNC

SEQ ID NO: 7002 - protein, 9 aa, Artificial Sequence
  Description of Artificial Sequence: Synthetic peptide
STTKILEPF

SEQ ID NO: 7003 - protein, 9 aa, Artificial Sequence
  Description of Artificial Sequence: Synthetic peptide
EISNYTNTI

SEQ ID NO: 7004 - protein, 11 aa, Artificial Sequence
  Description of Artificial Sequence: Synthetic peptide
ESSNTSGDYRL

SEQ ID NO: 7005 - protein, 9 aa, Artificial Sequence
  Description of Artificial Sequence: Synthetic peptide
EAIHGQVNC

SEQ ID NO: 7006 - protein, 10 aa, Artificial Sequence
  Description of Artificial Sequence: Synthetic peptide
NTSNLFNITA

SEQ ID NO: 7007 - protein, 11 aa, Artificial Sequence
  Description of Artificial Sequence: Synthetic peptide
ETFYVDGASNR

SEQ ID NO: 7008 - protein, 9 aa, Artificial Sequence
  Description of Artificial Sequence: Synthetic peptide
NVKTIIVHL

SEQ ID NO: 7009 - protein, 10 aa, Artificial Sequence
  Description of Artificial Sequence: Synthetic peptide
EIVNQIIEQL

SEQ ID NO: 7010 - protein, 9 aa, Artificial Sequence
  Description of Artificial Sequence: Synthetic peptide
IVNQIIEQL

SEQ ID NO: 7011 - protein, 9 aa, Artificial Sequence
  Description of Artificial Sequence: Synthetic peptide
YTAFTIPSI

SEQ ID NO: 7012 - protein, 9 aa, Artificial Sequence
  Description of Artificial Sequence: Synthetic peptide
NTVATLYCV

SEQ ID NO: 7013 - protein, 9 aa, Artificial Sequence
  Description of Artificial Sequence: Synthetic peptide
ETTNQKAEL

SEQ ID NO: 7014 - protein, 10 aa, Artificial Sequence
  Description of Artificial Sequence: Synthetic peptide
ETTPAPKQEL

SEQ ID NO: 7015 - protein, 10 aa, Artificial Sequence
  Description of Artificial Sequence: Synthetic peptide
KVVEIKPLGV

SEQ ID NO: 7016 - protein, 9 aa, Artificial Sequence
  Description of Artificial Sequence: Synthetic peptide
GAASITLTV

SEQ ID NO: 7017 - protein, 9 aa, Artificial Sequence
  Description of Artificial Sequence: Synthetic peptide
EIIGNIRQA

SEQ ID NO: 7018 - protein, 9 aa, Artificial Sequence
  Description of Artificial Sequence: Synthetic peptide
TTSTLQEQI

SEQ ID NO: 7019 - protein, 9 aa, Artificial Sequence
  Description of Artificial Sequence: Synthetic peptide
DIAGTTSNL

SEQ ID NO: 7020 - protein, 10 aa, Artificial Sequence
  Description of Artificial Sequence: Synthetic peptide
KVVEVKPLGV

SEQ ID NO: 7021 - protein, 10 aa, Artificial Sequence
  Description of Artificial Sequence: Synthetic peptide
HTNDVKQLTA

SEQ ID NO: 7022 - protein, 9 aa, Artificial Sequence
  Description of Artificial Sequence: Synthetic peptide
EIIGDIRQA

SEQ ID NO: 7023 - protein, 9 aa, Artificial Sequence
  Description of Artificial Sequence: Synthetic peptide
AVLSIVNRV

SEQ ID NO: 7024 - protein, 10 aa, Artificial Sequence
  Description of Artificial Sequence: Synthetic peptide
DTTAIVVAEG

SEQ ID NO: 7025 - protein, 9 aa, Artificial Sequence
  Description of Artificial Sequence: Synthetic peptide
SAISLFDTI

SEQ ID NO: 7026 - protein, 9 aa, Artificial Sequence
  Description of Artificial Sequence: Synthetic peptide
QNFPIVQNL

SEQ ID NO: 7027 - protein, 11 aa, Artificial Sequence
  Description of Artificial Sequence: Synthetic peptide
ETFYVDGAANR

SEQ ID NO: 7028 - protein, 9 aa, Artificial Sequence
  Description of Artificial Sequence: Synthetic peptide
DIIYNLLEV

SEQ ID NO: 7029 - protein, 9 aa, Artificial Sequence
  Description of Artificial Sequence: Synthetic peptide
MTGNPPVPV

SEQ ID NO: 7030 - protein, 9 aa, Artificial Sequence
  Description of Artificial Sequence: Synthetic peptide
DVKQLTEAV

SEQ ID NO: 7031 - protein, 9 aa, Artificial Sequence
  Description of Artificial Sequence: Synthetic peptide
QLTAVVQKI

SEQ ID NO: 7032 - protein, 9 aa, Artificial Sequence
  Description of Artificial Sequence: Synthetic peptide
LVNQIIEQL

SEQ ID NO: 7033 - protein, 9 aa, Artificial Sequence
  Description of Artificial Sequence: Synthetic peptide
MTSNPPIPV

SEQ ID NO: 7034 - protein, 9 aa, Artificial Sequence
  Description of Artificial Sequence: Synthetic peptide
EVIQGIWRA

SEQ ID NO: 7035 - protein, 9 aa, Artificial Sequence
  Description of Artificial Sequence: Synthetic peptide
ESVEITCTR

SEQ ID NO: 7036 - protein, 9 aa, Artificial Sequence
  Description of Artificial Sequence: Synthetic peptide
QNYPIVQNL

SEQ ID NO: 7037 - protein, 9 aa, Artificial Sequence
  Description of Artificial Sequence: Synthetic peptide
MTNNPPVPV

SEQ ID NO: 7038 - protein, 9 aa, Artificial Sequence
  Description of Artificial Sequence: Synthetic peptide
SPTSRELQV

SEQ ID NO: 7039 - protein, 10 aa, Artificial Sequence
  Description of Artificial Sequence: Synthetic peptide
RPSNNTRESI

SEQ ID NO: 7040 - protein, 9 aa, Artificial Sequence
  Description of Artificial Sequence: Synthetic peptide
SPAIFQNSM

SEQ ID NO: 7041 - protein, 9 aa, Artificial Sequence
  Description of Artificial Sequence: Synthetic peptide
SPAIFQSSM

SEQ ID NO: 7042 - protein, 8 aa, Artificial Sequence
  Description of Artificial Sequence: Synthetic peptide
TPSPKQEL

SEQ ID NO: 7043 - protein, 8 aa, Artificial Sequence
  Description of Artificial Sequence: Synthetic peptide
TPAPKQEL

SEQ ID NO: 7044 - protein, 10 aa, Artificial Sequence
  Description of Artificial Sequence: Synthetic peptide
SPSPMTNCSF

SEQ ID NO: 7045 - protein, 10 aa, Artificial Sequence
  Description of Artificial Sequence: Synthetic peptide
RPDNNTRKSI

SEQ ID NO: 7046 - protein, 9 aa, Artificial Sequence
  Description of Artificial Sequence: Synthetic peptide
GPAHKARVL

SEQ ID NO: 7047 - protein, 11 aa, Artificial Sequence
  Description of Artificial Sequence: Synthetic peptide
SPISGKSCTVL

SEQ ID NO: 7048 - protein, 10 aa, Artificial Sequence
  Description of Artificial Sequence: Synthetic peptide
SIRIGPGQAF

SEQ ID NO: 7049 - protein, 9 aa, Artificial Sequence
  Description of Artificial Sequence: Synthetic peptide
AELLGRSSL

SEQ ID NO: 7050 - protein, 9 aa, Artificial Sequence
  Description of Artificial Sequence: Synthetic peptide
QPNKSESEL

SEQ ID NO: 7051 - protein, 9 aa, Artificial Sequence
  Description of Artificial Sequence: Synthetic peptide
GPSHKARVL

SEQ ID NO: 7052 - protein, 10 aa, Artificial Sequence
  Description of Artificial Sequence: Synthetic peptide
RPAEPVPLQL

SEQ ID NO: 7053 - protein, 10 aa, Artificial Sequence
  Description of Artificial Sequence: Synthetic peptide
RPNNNTRKSI

SEQ ID NO: 7054 - protein, 10 aa, Artificial Sequence
  Description of Artificial Sequence: Synthetic peptide
SIRIGPGQTF

SEQ ID NO: 7055 - protein, 8 aa, Artificial Sequence
  Description of Artificial Sequence: Synthetic peptide
KPVVSTQL

SEQ ID NO: 7056 - protein, 10 aa, Artificial Sequence
  Description of Artificial Sequence: Synthetic peptide
SPIETVPVKL

SEQ ID NO: 7057 - protein, 10 aa, Artificial Sequence
  Description of Artificial Sequence: Synthetic peptide
VPTDPSPQEL

SEQ ID NO: 7058 - protein, 11 aa, Artificial Sequence
  Description of Artificial Sequence: Synthetic peptide
VPAGPIAPGQL

SEQ ID NO: 7059 - protein, 11 aa, Artificial Sequence
  Description of Artificial Sequence: Synthetic peptide
SPVSGKPCAVL

SEQ ID NO: 7060 - protein, 9 aa, Artificial Sequence
  Description of Artificial Sequence: Synthetic peptide
LTRDGGTGM

SEQ ID NO: 7061 - protein, 11 aa, Artificial Sequence
  Description of Artificial Sequence: Synthetic peptide
RAAELLGRSSL

SEQ ID NO: 7062 - protein, 10 aa, Artificial Sequence
  Description of Artificial Sequence: Synthetic peptide
AVELLGRSSL

SEQ ID NO: 7063 - protein, 9 aa, Artificial Sequence
  Description of Artificial Sequence: Synthetic peptide
KDREPLTSL

SEQ ID NO: 7064 - protein, 9 aa, Artificial Sequence
  Description of Artificial Sequence: Synthetic peptide
TEAVQKIAL

SEQ ID NO: 7065 - protein, 9 aa, Artificial Sequence
  Description of Artificial Sequence: Synthetic peptide
TPQDLNTML

SEQ ID NO: 7066 - protein, 9 aa, Artificial Sequence
  Description of Artificial Sequence: Synthetic peptide
ELKKSAISL

SEQ ID NO: 7067 - protein, 8 aa, Artificial Sequence
  Description of Artificial Sequence: Synthetic peptide
EAVQKIAL

SEQ ID NO: 7068 - protein, 8 aa, Artificial Sequence
  Description of Artificial Sequence: Synthetic peptide
TPAPKQEL

SEQ ID NO: 7069 - protein, 8 aa, Artificial Sequence
  Description of Artificial Sequence: Synthetic peptide
DAWEKIKL

SEQ ID NO: 7070 - protein, 8 aa, Artificial Sequence
  Description of Artificial Sequence: Synthetic peptide
NPISKQPL

SEQ ID NO: 7071 - protein, 8 aa, Artificial Sequence
  Description of Artificial Sequence: Synthetic peptide
TPSPKQEL

SEQ ID NO: 7072 - protein, 9 aa, Artificial Sequence
  Description of Artificial Sequence: Synthetic peptide
TAVVQKIAL

SEQ ID NO: 7073 - protein, 8 aa, Artificial Sequence
  Description of Artificial Sequence: Synthetic peptide
ELLGRSSL

SEQ ID NO: 7074 - protein, 9 aa, Artificial Sequence
  Description of Artificial Sequence: Synthetic peptide
DVKQLTEAV

SEQ ID NO: 7075 - protein, 9 aa, Artificial Sequence
  Description of Artificial Sequence: Synthetic peptide
DSAIRKAIL

SEQ ID NO: 7076 - protein, 8 aa, Artificial Sequence
  Description of Artificial Sequence: Synthetic peptide
TTNQKTEL

SEQ ID NO: 7077 - protein, 8 aa, Artificial Sequence
  Description of Artificial Sequence: Synthetic peptide
HLKTAVQM

SEQ ID NO: 7078 - protein, 9 aa, Artificial Sequence
  Description of Artificial Sequence: Synthetic peptide
ELKSLFNTV

SEQ ID NO: 7079 - protein, 11 aa, Artificial Sequence
  Description of Artificial Sequence: Synthetic peptide
TQVDPGLADQL

SEQ ID NO: 7080 - protein, 11 aa, Artificial Sequence
  Description of Artificial Sequence: Synthetic peptide
TQVEPGLADQL

SEQ ID NO: 7081 - protein, 11 aa, Artificial Sequence
  Description of Artificial Sequence: Synthetic peptide
TQVDPGLADHL

SEQ ID NO: 7082 - protein, 10 aa, Artificial Sequence
  Description of Artificial Sequence: Synthetic peptide
QQDKNEKDLL

SEQ ID NO: 7083 - protein, 10 aa, Artificial Sequence
  Description of Artificial Sequence: Synthetic peptide
RQLTEAVQKI

SEQ ID NO: 7084 - protein, 9 aa, Artificial Sequence
  Description of Artificial Sequence: Synthetic peptide
GQDQWTYQI

SEQ ID NO: 7085 - protein, 10 aa, Artificial Sequence
  Description of Artificial Sequence: Synthetic peptide
RVDPGLADQL

SEQ ID NO: 7086 - protein, 9 aa, Artificial Sequence
  Description of Artificial Sequence: Synthetic peptide
GLENVTENF

SEQ ID NO: 7087 - protein, 9 aa, Artificial Sequence
  Description of Artificial Sequence: Synthetic peptide
IQKQGQDQW

SEQ ID NO: 7088 - protein, 10 aa, Artificial Sequence
  Description of Artificial Sequence: Synthetic peptide
GQVRDQAEHL

SEQ ID NO: 7089 - protein, 9 aa, Artificial Sequence
  Description of Artificial Sequence: Synthetic peptide
IQKQGNDQW

SEQ ID NO: 7090 - protein, 9 aa, Artificial Sequence
  Description of Artificial Sequence: Synthetic peptide
KQMAGADCM

SEQ ID NO: 7091 - protein, 9 aa, Artificial Sequence
  Description of Artificial Sequence: Synthetic peptide
RLIEGLQGI

SEQ ID NO: 7092 - protein, 9 aa, Artificial Sequence
  Description of Artificial Sequence: Synthetic peptide
GQVFYTNEI

SEQ ID NO: 7093 - protein, 10 aa, Artificial Sequence
  Description of Artificial Sequence: Synthetic peptide
KQLTEAVQKI

SEQ ID NO: 7094 - protein, 10 aa, Artificial Sequence
  Description of Artificial Sequence: Synthetic peptide
IVVGEGTDRF

SEQ ID NO: 7095 - protein, 9 aa, Artificial Sequence
  Description of Artificial Sequence: Synthetic peptide
QQEEEEVGF

SEQ ID NO: 7096 - protein, 9 aa, Artificial Sequence
  Description of Artificial Sequence: Synthetic peptide
QLTAVVQKI

SEQ ID NO: 7097 - protein, 9 aa, Artificial Sequence
  Description of Artificial Sequence: Synthetic peptide
GQNQWTYQI

SEQ ID NO: 7098 - protein, 9 aa, Artificial Sequence
  Description of Artificial Sequence: Synthetic peptide
QQHMLQLTV

SEQ ID NO: 7099 - protein, 9 aa, Artificial Sequence
  Description of Artificial Sequence: Synthetic peptide
GAASITLTV

SEQ ID NO: 7100 - protein, 9 aa, Artificial Sequence
  Description of Artificial Sequence: Synthetic peptide
QLTEAVQKI

SEQ ID NO: 7101 - protein, 9 aa, Artificial Sequence
  Description of Artificial Sequence: Synthetic peptide
GQVFYTNEI

SEQ ID NO: 7102 - protein, 9 aa, Artificial Sequence
  Description of Artificial Sequence: Synthetic peptide
SQIYPGIQV

SEQ ID NO: 7103 - protein, 9 aa, Artificial Sequence
  Description of Artificial Sequence: Synthetic peptide
ILAQIQPAI

SEQ ID NO: 7104 - protein, 8 aa, Artificial Sequence
  Description of Artificial Sequence: Synthetic peptide
GQMVHQAI

SEQ ID NO: 7105 - protein, 9 aa, Artificial Sequence
  Description of Artificial Sequence: Synthetic peptide
SQIYPGIKV

SEQ ID NO: 7106 - protein, 9 aa, Artificial Sequence
  Description of Artificial Sequence: Synthetic peptide
QQHLLQLTV

SEQ ID NO: 7107 - protein, 9 aa, Artificial Sequence
  Description of Artificial Sequence: Synthetic peptide
GQVDCSPGI

SEQ ID NO: 7108 - protein, 9 aa, Artificial Sequence
  Description of Artificial Sequence: Synthetic peptide
VQKIATESI

SEQ ID NO: 7109 - protein, 9 aa, Artificial Sequence
  Description of Artificial Sequence: Synthetic peptide
GQDQWTYQI

SEQ ID NO: 7110 - protein, 8 aa, Artificial Sequence
  Description of Artificial Sequence: Synthetic peptide
FQTKGLGI

SEQ ID NO: 7111 - protein, 9 aa, Artificial Sequence
  Description of Artificial Sequence: Synthetic peptide
AVISIVNRV

SEQ ID NO: 7112 - protein, 9 aa, Artificial Sequence
  Description of Artificial Sequence: Synthetic peptide
LQTGTKELI

SEQ ID NO: 7113 - protein, 8 aa, Artificial Sequence
  Description of Artificial Sequence: Synthetic peptide
LQNQILKI

SEQ ID NO: 7114 - protein, 9 aa, Artificial Sequence
  Description of Artificial Sequence: Synthetic peptide
AVLSIVNRV

SEQ ID NO: 7115 - protein, 8 aa, Artificial Sequence
  Description of Artificial Sequence: Synthetic peptide
FQAKGLGI

SEQ ID NO: 7116 - protein, 10 aa, Artificial Sequence
  Description of Artificial Sequence: Synthetic peptide
RQLTEAVQKI

SEQ ID NO: 7117 - protein, 9 aa, Artificial Sequence
  Description of Artificial Sequence: Synthetic peptide
VLAEAMSQI

SEQ ID NO: 7118 - protein, 9 aa, Artificial Sequence
  Description of Artificial Sequence: Synthetic peptide
ASITLTVQV

SEQ ID NO: 7119 - protein, 9 aa, Artificial Sequence
  Description of Artificial Sequence: Synthetic peptide
VQKIALESI

SEQ ID NO: 7120 - protein, 9 aa, Artificial Sequence
  Description of Artificial Sequence: Synthetic peptide
VLAEAMSQV

SEQ ID NO: 7121 - protein, 8 aa, Artificial Sequence
  Description of Artificial Sequence: Synthetic peptide
SQVNNTTI

SEQ ID NO: 7122 - protein, 10 aa, Artificial Sequence
  Description of Artificial Sequence: Synthetic peptide
KQLTEAVQKI

SEQ ID NO: 7123 - protein, 9 aa, Artificial Sequence
  Description of Artificial Sequence: Synthetic peptide
GQVNCSPGI

SEQ ID NO: 7124 - protein, 9 aa, Artificial Sequence
  Description of Artificial Sequence: Synthetic peptide
RIIEVIQGI

SEQ ID NO: 7125 - protein, 8 aa, Artificial Sequence
  Description of Artificial Sequence: Synthetic peptide
NQIIEQLI

SEQ ID NO: 7126 - protein, 10 aa, Artificial Sequence
  Description of Artificial Sequence: Synthetic peptide
IQTKELQNQI

SEQ ID NO: 7127 - protein, 9 aa, Artificial Sequence
  Description of Artificial Sequence: Synthetic peptide
KQMAGADCV

SEQ ID NO: 7128 - protein, 9 aa, Artificial Sequence
  Description of Artificial Sequence: Synthetic peptide
RLIEGLQGI

SEQ ID NO: 7129 - protein, 9 aa, Artificial Sequence
  Description of Artificial Sequence: Synthetic peptide
VLAEAMSKV

SEQ ID NO: 7130 - protein, 10 aa, Artificial Sequence
  Description of Artificial Sequence: Synthetic peptide
KVVEVKPLGV

SEQ ID NO: 7131 - protein, 9 aa, Artificial Sequence
  Description of Artificial Sequence: Synthetic peptide
VQLNESVEI

SEQ ID NO: 7132 - protein, 10 aa, Artificial Sequence
  Description of Artificial Sequence: Synthetic peptide
SLFGSDPLST

SEQ ID NO: 7133 - protein, 9 aa, Artificial Sequence
  Description of Artificial Sequence: Synthetic peptide
VQNMQGQMV

SEQ ID NO: 7134 - protein, 8 aa, Artificial Sequence
  Description of Artificial Sequence: Synthetic peptide
GQMVHQPI

SEQ ID NO: 7135 - protein, 8 aa, Artificial Sequence
  Description of Artificial Sequence: Synthetic peptide
GQETAYFI

SEQ ID NO: 7136 - protein, 9 aa, Artificial Sequence
  Description of Artificial Sequence: Synthetic peptide
ASVDYRLGV

SEQ ID NO: 7137 - protein, 9 aa, Artificial Sequence
  Description of Artificial Sequence: Synthetic peptide
ALTQACPKV

SEQ ID NO: 7138 - protein, 9 aa, Artificial Sequence
  Description of Artificial Sequence: Synthetic peptide
NQKTELQAI

SEQ ID NO: 7139 - protein, 10 aa, Artificial Sequence
  Description of Artificial Sequence: Synthetic peptide
KQLTAVVQKI

SEQ ID NO: 7140 - protein, 9 aa, Artificial Sequence
  Description of Artificial Sequence: Synthetic peptide
NQKAELQAI

SEQ ID NO: 7141 - protein, 9 aa, Artificial Sequence
  Description of Artificial Sequence: Synthetic peptide
ERYLRDQQL

SEQ ID NO: 7142 - protein, 9 aa, Artificial Sequence
  Description of Artificial Sequence: Synthetic peptide
DRFAVNPGL

SEQ ID NO: 7143 - protein, 9 aa, Artificial Sequence
  Description of Artificial Sequence: Synthetic peptide
ERYLKDQQL

SEQ ID NO: 7144 - protein, 8 aa, Artificial Sequence
  Description of Artificial Sequence: Synthetic peptide
ERILSTCL

SEQ ID NO: 7145 - protein, 9 aa, Artificial Sequence
  Description of Artificial Sequence: Synthetic peptide
ERFALNPGL

SEQ ID NO: 7146 - protein, 9 aa, Artificial Sequence
  Description of Artificial Sequence: Synthetic peptide
ERYLRDQQL

SEQ ID NO: 7147 - protein, 9 aa, Artificial Sequence
  Description of Artificial Sequence: Synthetic peptide
ERYLKDQQL

SEQ ID NO: 7148 - protein, 8 aa, Artificial Sequence
  Description of Artificial Sequence: Synthetic peptide
GQMVHQAI

SEQ ID NO: 7149 - protein, 8 aa, Artificial Sequence
  Description of Artificial Sequence: Synthetic peptide
GQMVHQPL

SEQ ID NO: 7150 - protein, 9 aa, Artificial Sequence
  Description of Artificial Sequence: Synthetic peptide
DEMEREGKI

SEQ ID NO: 7151 - protein, 8 aa, Artificial Sequence
  Description of Artificial Sequence: Synthetic peptide
DLDKHGAL

SEQ ID NO: 7152 - protein, 9 aa, Artificial Sequence
  Description of Artificial Sequence: Synthetic peptide
DRFAVNPGL

SEQ ID NO: 7153 - protein, 9 aa, Artificial Sequence
  Description of Artificial Sequence: Synthetic peptide
QDLDRYGAL

SEQ ID NO: 7154 - protein, 8 aa, Artificial Sequence
  Description of Artificial Sequence: Synthetic peptide
IQKLVGKL

SEQ ID NO: 7155 - protein, 9 aa, Artificial Sequence
  Description of Artificial Sequence: Synthetic peptide
QDLDKHGAL

SEQ ID NO: 7156 - protein, 9 aa, Artificial Sequence
  Description of Artificial Sequence: Synthetic peptide
TEAVQKIAL

SEQ ID NO: 7157 - protein, 8 aa, Artificial Sequence
  Description of Artificial Sequence: Synthetic peptide
KEPVHGVF

SEQ ID NO: 7158 - protein, 9 aa, Artificial Sequence
  Description of Artificial Sequence: Synthetic peptide
VELLGRSSL

SEQ ID NO: 7159 - protein, 9 aa, Artificial Sequence
  Description of Artificial Sequence: Synthetic peptide
DKTQKVNAL

SEQ ID NO: 7160 - protein, 9 aa, Artificial Sequence
  Description of Artificial Sequence: Synthetic peptide
AQNPEIVIY

SEQ ID NO: 7161 - protein, 9 aa, Artificial Sequence
  Description of Artificial Sequence: Synthetic peptide
QAKGLGISY

SEQ ID NO: 7162 - protein, 9 aa, Artificial Sequence
  Description of Artificial Sequence: Synthetic peptide
AQNPEIIIY

SEQ ID NO: 7163 - protein, 9 aa, Artificial Sequence
  Description of Artificial Sequence: Synthetic peptide
QTKGLGISY

SEQ ID NO: 7164 - protein, 10 aa, Artificial Sequence
  Description of Artificial Sequence: Synthetic peptide
FQAKGLGISY

SEQ ID NO: 7165 - protein, 9 aa, Artificial Sequence
  Description of Artificial Sequence: Synthetic peptide
SQINNGNIM

SEQ ID NO: 7166 - protein, 8 aa, Artificial Sequence
  Description of Artificial Sequence: Synthetic peptide
GQYVYETY

SEQ ID NO: 7167 - protein, 8 aa, Artificial Sequence
  Description of Artificial Sequence: Synthetic peptide
GQYIYETY

SEQ ID NO: 7168 - protein, 9 aa, Artificial Sequence
  Description of Artificial Sequence: Synthetic peptide
KQITKVQNF

SEQ ID NO: 7169 - protein, 9 aa, Artificial Sequence
  Description of Artificial Sequence: Synthetic peptide
RIGPGQTFY

SEQ ID NO: 7170 - protein, 9 aa, Artificial Sequence
  Description of Artificial Sequence: Synthetic peptide
TQKVNALFY

SEQ ID NO: 7171 - protein, 8 aa, Artificial Sequence
  Description of Artificial Sequence: Synthetic peptide
GQYIYATY

SEQ ID NO: 7172 - protein, 9 aa, Artificial Sequence
  Description of Artificial Sequence: Synthetic peptide
TQACPKVSF

SEQ ID NO: 7173 - protein, 9 aa, Artificial Sequence
  Description of Artificial Sequence: Synthetic peptide
VQKIATESI

SEQ ID NO: 7174 - protein, 8 aa, Artificial Sequence
  Description of Artificial Sequence: Synthetic peptide
GQHIYETY

SEQ ID NO: 7175 - protein, 9 aa, Artificial Sequence
  Description of Artificial Sequence: Synthetic peptide
TQACPKVTF

SEQ ID NO: 7176 - protein, 9 aa, Artificial Sequence
  Description of Artificial Sequence: Synthetic peptide
SQVNNTTIM

SEQ ID NO: 7177 - protein, 9 aa, Artificial Sequence
  Description of Artificial Sequence: Synthetic peptide
LQVRGSNTF

SEQ ID NO: 7178 - protein, 11 aa, Artificial Sequence
  Description of Artificial Sequence: Synthetic peptide
AQNPEIVIYQY

SEQ ID NO: 7179 - protein, 9 aa, Artificial Sequence
  Description of Artificial Sequence: Synthetic peptide
KQGQNQWTY

SEQ ID NO: 7180 - protein, 9 aa, Artificial Sequence
  Description of Artificial Sequence: Synthetic peptide
TVLDVGDAY

SEQ ID NO: 7181 - protein, 11 aa, Artificial Sequence
  Description of Artificial Sequence: Synthetic peptide
IQKQGNDQWTY

SEQ ID NO: 7182 - protein, 9 aa, Artificial Sequence
  Description of Artificial Sequence: Synthetic peptide
IQKQGQNQW

SEQ ID NO: 7183 - protein, 10 aa, Artificial Sequence
  Description of Artificial Sequence: Synthetic peptide
ILKEPVHGVY

SEQ ID NO: 7184 - protein, 10 aa, Artificial Sequence
  Description of Artificial Sequence: Synthetic peptide
FQTKGLGISY

SEQ ID NO: 7185 - protein, 10 aa, Artificial Sequence
  Description of Artificial Sequence: Synthetic peptide
FQKKGLGISY

SEQ ID NO: 7186 - protein, 9 aa, Artificial Sequence
  Description of Artificial Sequence: Synthetic peptide
IRIGPGQAF

SEQ ID NO: 7187 - protein, 11 aa, Artificial Sequence
  Description of Artificial Sequence: Synthetic peptide
AQNPEIIIYQY

SEQ ID NO: 7188 - protein, 9 aa, Artificial Sequence
  Description of Artificial Sequence: Synthetic peptide
KQIMKIQNF

SEQ ID NO: 7189 - protein, 9 aa, Artificial Sequence
  Description of Artificial Sequence: Synthetic peptide
IRIGPGQTF

SEQ ID NO: 7190 - protein, 9 aa, Artificial Sequence
  Description of Artificial Sequence: Synthetic peptide
RIGPGQAFY

SEQ ID NO: 7191 - protein, 9 aa, Artificial Sequence
  Description of Artificial Sequence: Synthetic peptide
KQIIKIQNF

SEQ ID NO: 7192 - protein, 9 aa, Artificial Sequence
  Description of Artificial Sequence: Synthetic peptide
IQQEFGIPY

SEQ ID NO: 7193 - protein, 10 aa, Artificial Sequence
  Description of Artificial Sequence: Synthetic peptide
SQINNGNIMM

SEQ ID NO: 7194 - protein, 9 aa, Artificial Sequence
  Description of Artificial Sequence: Synthetic peptide
NQILKIQNF

SEQ ID NO: 7195 - protein, 8 aa, Artificial Sequence
  Description of Artificial Sequence: Synthetic peptide
AVHVASGY

SEQ ID NO: 7196 - protein, 11 aa, Artificial Sequence
  Description of Artificial Sequence: Synthetic peptide
IQKQGQDQWTY

SEQ ID NO: 7197 - protein, 9 aa, Artificial Sequence
  Description of Artificial Sequence: Synthetic peptide
TSSLFNSTY

SEQ ID NO: 7198 - protein, 9 aa, Artificial Sequence
  Description of Artificial Sequence: Synthetic peptide
ANIVTDSQY

SEQ ID NO: 7199 - protein, 9 aa, Artificial Sequence
  Description of Artificial Sequence: Synthetic peptide
FLGAAGSTM

SEQ ID NO: 7200 - protein, 8 aa, Artificial Sequence
  Description of Artificial Sequence: Synthetic peptide
GQMVHQAI

SEQ ID NO: 7201 - protein, 9 aa, Artificial Sequence
  Description of Artificial Sequence: Synthetic peptide
TQLGRTLNF

SEQ ID NO: 7202 - protein, 9 aa, Artificial Sequence
  Description of Artificial Sequence: Synthetic peptide
ISNYTNTIY

SEQ ID NO: 7203 - protein, 9 aa, Artificial Sequence
  Description of Artificial Sequence: Synthetic peptide
KQGQDQWTY

SEQ ID NO: 7204 - protein, 9 aa, Artificial Sequence
  Description of Artificial Sequence: Synthetic peptide
FLGTAGSTM

SEQ ID NO: 7205 - protein, 9 aa, Artificial Sequence
  Description of Artificial Sequence: Synthetic peptide
IQKQGQDQW

SEQ ID NO: 7206 - protein, 10 aa, Artificial Sequence
  Description of Artificial Sequence: Synthetic peptide
SIRIGPGQTF

SEQ ID NO: 7207 - protein, 8 aa, Artificial Sequence
  Description of Artificial Sequence: Synthetic peptide
FQNKTIEF

SEQ ID NO: 7208 - protein, 8 aa, Artificial Sequence
  Description of Artificial Sequence: Synthetic peptide
TQKVNALF

SEQ ID NO: 7209 - protein, 9 aa, Artificial Sequence
  Description of Artificial Sequence: Synthetic peptide
RIGPGQVFY

SEQ ID NO: 7210 - protein, 9 aa, Artificial Sequence
  Description of Artificial Sequence: Synthetic peptide
SQIYPGIQV

SEQ ID NO: 7211 - protein, 10 aa, Artificial Sequence
  Description of Artificial Sequence: Synthetic peptide
GFLGTAGSTM

SEQ ID NO: 7212 - protein, 9 aa, Artificial Sequence
  Description of Artificial Sequence: Synthetic peptide
TVLDVGDAY

SEQ ID NO: 7213 - protein, 9 aa, Artificial Sequence
  Description of Artificial Sequence: Synthetic peptide
FLGAAGSTM

SEQ ID NO: 7214 - protein, 9 aa, Artificial Sequence
  Description of Artificial Sequence: Synthetic peptide
FLGTAGSTM

SEQ ID NO: 7215 - protein, 9 aa, Artificial Sequence
  Description of Artificial Sequence: Synthetic peptide
QAKGLGISY

SEQ ID NO: 7216 - protein, 10 aa, Artificial Sequence
  Description of Artificial Sequence: Synthetic peptide
FQAKGLGISY

SEQ ID NO: 7217 - protein, 9 aa, Artificial Sequence
  Description of Artificial Sequence: Synthetic peptide
EARLVITTY

SEQ ID NO: 7218 - protein, 9 aa, Artificial Sequence
  Description of Artificial Sequence: Synthetic peptide
TQACPKVSF

SEQ ID NO: 7219 - protein, 9 aa, Artificial Sequence
  Description of Artificial Sequence: Synthetic peptide
SAISLFDTI

SEQ ID NO: 7220 - protein, 9 aa, Artificial Sequence
  Description of Artificial Sequence: Synthetic peptide
TVGGHQAAM

SEQ ID NO: 7221 - protein, 8 aa, Artificial Sequence
  Description of Artificial Sequence: Synthetic peptide
FLYASVDY

SEQ ID NO: 7222 - protein, 10 aa, Artificial Sequence
  Description of Artificial Sequence: Synthetic peptide
SIRIGPGQAF

SEQ ID NO: 7223 - protein, 10 aa, Artificial Sequence
  Description of Artificial Sequence: Synthetic peptide
EINNYTNTIY

SEQ ID NO: 7224 - protein, 10 aa, Artificial Sequence
  Description of Artificial Sequence: Synthetic peptide
FQTKGLGISY

SEQ ID NO: 7225 - protein, 9 aa, Artificial Sequence
  Description of Artificial Sequence: Synthetic peptide
SQVNNTTIM

SEQ ID NO: 7226 - protein, 9 aa, Artificial Sequence
  Description of Artificial Sequence: Synthetic peptide
TQACPKVTF

SEQ ID NO: 7227 - protein, 9 aa, Artificial Sequence
  Description of Artificial Sequence: Synthetic peptide
SQINNGNIM

SEQ ID NO: 7228 - protein, 10 aa, Artificial Sequence
  Description of Artificial Sequence: Synthetic peptide
SIRIGPGQTF

SEQ ID NO: 7229 - protein, 9 aa, Artificial Sequence
  Description of Artificial Sequence: Synthetic peptide
IRIGPGQAF

SEQ ID NO: 7230 - protein, 9 aa, Artificial Sequence
  Description of Artificial Sequence: Synthetic peptide
SPAIFQNSM

SEQ ID NO: 7231 - protein, 9 aa, Artificial Sequence
  Description of Artificial Sequence: Synthetic peptide
TQKVNALFY

SEQ ID NO: 7232 - protein, 9 aa, Artificial Sequence
  Description of Artificial Sequence: Synthetic peptide
EARLVIITY

SEQ ID NO: 7233 - protein, 9 aa, Artificial Sequence
  Description of Artificial Sequence: Synthetic peptide
QTKGLGISY

SEQ ID NO: 7234 - protein, 8 aa, Artificial Sequence
  Description of Artificial Sequence: Synthetic peptide
NNYTNTIY

SEQ ID NO: 7235 - protein, 9 aa, Artificial Sequence
  Description of Artificial Sequence: Synthetic peptide
FPQGEAREF

SEQ ID NO: 7236 - protein, 9 aa, Artificial Sequence
  Description of Artificial Sequence: Synthetic peptide
SLDPIPIHY

SEQ ID NO: 7237 - protein, 10 aa, Artificial Sequence
  Description of Artificial Sequence: Synthetic peptide
FQKKGLGISY

SEQ ID NO: 7238 - protein, 8 aa, Artificial Sequence
  Description of Artificial Sequence: Synthetic peptide
FPNKTIEF

SEQ ID NO: 7239 - protein, 10 aa, Artificial Sequence
  Description of Artificial Sequence: Synthetic peptide
EISNYTNTIY

SEQ ID NO: 7240 - protein, 9 aa, Artificial Sequence
  Description of Artificial Sequence: Synthetic peptide
DAYFSVPLY

SEQ ID NO: 7241 - protein, 8 aa, Artificial Sequence
  Description of Artificial Sequence: Synthetic peptide
GQYIYETY

SEQ ID NO: 7242 - protein, 9 aa, Artificial Sequence
  Description of Artificial Sequence: Synthetic peptide
DIAGTTSTL

SEQ ID NO: 7243 - protein, 9 aa, Artificial Sequence
  Description of Artificial Sequence: Synthetic peptide
HLNQPVEIM

SEQ ID NO: 7244 - protein, 9 aa, Artificial Sequence
  Description of Artificial Sequence: Synthetic peptide
TSSLFNSTY

SEQ ID NO: 7245 - protein, 9 aa, Artificial Sequence
  Description of Artificial Sequence: Synthetic peptide
APNPEIVIY

SEQ ID NO: 7246 - protein, 10 aa, Artificial Sequence
  Description of Artificial Sequence: Synthetic peptide
EVNIVTDSQY

SEQ ID NO: 7247 - protein, 9 aa, Artificial Sequence
  Description of Artificial Sequence: Synthetic peptide
IRIGPGQTF

SEQ ID NO: 7248 - protein, 9 aa, Artificial Sequence
  Description of Artificial Sequence: Synthetic peptide
AKNPEIAIY

SEQ ID NO: 7249 - protein, 8 aa, Artificial Sequence
  Description of Artificial Sequence: Synthetic peptide
AKGLGISY

SEQ ID NO: 7250 - protein, 9 aa, Artificial Sequence
  Description of Artificial Sequence: Synthetic peptide
QKKGLGISY

SEQ ID NO: 7251 - protein, 8 aa, Artificial Sequence
  Description of Artificial Sequence: Synthetic peptide
TKGLGISY

SEQ ID NO: 7252 - protein, 9 aa, Artificial Sequence
  Description of Artificial Sequence: Synthetic peptide
AQNPEIVIY

SEQ ID NO: 7253 - protein, 9 aa, Artificial Sequence
  Description of Artificial Sequence: Synthetic peptide
QAKGLGISY

SEQ ID NO: 7254 - protein, 9 aa, Artificial Sequence
  Description of Artificial Sequence: Synthetic peptide
IRIGPGQAF

SEQ ID NO: 7255 - protein, 9 aa, Artificial Sequence
  Description of Artificial Sequence: Synthetic peptide
SKVNNTNIM

SEQ ID NO: 7256 - protein, 8 aa, Artificial Sequence
  Description of Artificial Sequence: Synthetic peptide
GQYVYETY

SEQ ID NO: 7257 - protein, 8 aa, Artificial Sequence
  Description of Artificial Sequence: Synthetic peptide
GQYIYATY

SEQ ID NO: 7258 - protein, 9 aa, Artificial Sequence
  Description of Artificial Sequence: Synthetic peptide
AQNPEIIIY

SEQ ID NO: 7259 - protein, 9 aa, Artificial Sequence
  Description of Artificial Sequence: Synthetic peptide
IRIGPGQTF

SEQ ID NO: 7260 - protein, 10 aa, Artificial Sequence
  Description of Artificial Sequence: Synthetic peptide
FQAKGLGISY

SEQ ID NO: 7261 - protein, 9 aa, Artificial Sequence
  Description of Artificial Sequence: Synthetic peptide
GKKAIGTVL

SEQ ID NO: 7262 - protein, 8 aa, Artificial Sequence
  Description of Artificial Sequence: Synthetic peptide
GQYIYETY

SEQ ID NO: 7263 - protein, 8 aa, Artificial Sequence
  Description of Artificial Sequence: Synthetic peptide
KKGLGISY

SEQ ID NO: 7264 - protein, 9 aa, Artificial Sequence
  Description of Artificial Sequence: Synthetic peptide
KQITKVQNF

SEQ ID NO: 7265 - protein, 9 aa, Artificial Sequence
  Description of Artificial Sequence: Synthetic peptide
SQVNNTTIM

SEQ ID NO: 7266 - protein, 9 aa, Artificial Sequence
  Description of Artificial Sequence: Synthetic peptide
TQKVNALFY

SEQ ID NO: 7267 - protein, 9 aa, Artificial Sequence
  Description of Artificial Sequence: Synthetic peptide
TKIGPENPY

SEQ ID NO: 7268 - protein, 9 aa, Artificial Sequence
  Description of Artificial Sequence: Synthetic peptide
TKVQNFRVY

SEQ ID NO: 7269 - protein, 9 aa, Artificial Sequence
  Description of Artificial Sequence: Synthetic peptide
SQINNGNIM

SEQ ID NO: 7270 - protein, 9 aa, Artificial Sequence
  Description of Artificial Sequence: Synthetic peptide
IRIGPGQVF

SEQ ID NO: 7271 - protein, 9 aa, Artificial Sequence
  Description of Artificial Sequence: Synthetic peptide
VKVIEEKAF

SEQ ID NO: 7272 - protein, 9 aa, Artificial Sequence
  Description of Artificial Sequence: Synthetic peptide
VKVVEEKAF

SEQ ID NO: 7273 - protein, 9 aa, Artificial Sequence
  Description of Artificial Sequence: Synthetic peptide
TQACPKVSF

SEQ ID NO: 7274 - protein, 9 aa, Artificial Sequence
  Description of Artificial Sequence: Synthetic peptide
EHFPNKTII

SEQ ID NO: 7275 - protein, 9 aa, Artificial Sequence
  Description of Artificial Sequence: Synthetic peptide
HQAISPRTL

SEQ ID NO: 7276 - protein, 9 aa, Artificial Sequence
  Description of Artificial Sequence: Synthetic peptide
AHTNDVRQL

SEQ ID NO: 7277 - protein, 9 aa, Artificial Sequence
  Description of Artificial Sequence: Synthetic peptide
EHLKTAVQM

SEQ ID NO: 7278 - protein, 9 aa, Artificial Sequence
  Description of Artificial Sequence: Synthetic peptide
THLEGKIIL

SEQ ID NO: 7279 - protein, 10 aa, Artificial Sequence
  Description of Artificial Sequence: Synthetic peptide
VHQPISARTL

SEQ ID NO: 7280 - protein, 9 aa, Artificial Sequence
  Description of Artificial Sequence: Synthetic peptide
GHQAAMQML

SEQ ID NO: 7281 - protein, 9 aa, Artificial Sequence
  Description of Artificial Sequence: Synthetic peptide
QHRAPIEEL

SEQ ID NO: 7282 - protein, 9 aa, Artificial Sequence
  Description of Artificial Sequence: Synthetic peptide
IHSISERIL

SEQ ID NO: 7283 - protein, 9 aa, Artificial Sequence
  Description of Artificial Sequence: Synthetic peptide
IHSVSERIL

SEQ ID NO: 7284 - protein, 8 aa, Artificial Sequence
  Description of Artificial Sequence: Synthetic peptide
MHQDIISL

SEQ ID NO: 7285 - protein, 10 aa, Artificial Sequence
  Description of Artificial Sequence: Synthetic peptide
VHQPLSPRTL

SEQ ID NO: 7286 - protein, 8 aa, Artificial Sequence
  Description of Artificial Sequence: Synthetic peptide
LHNTVATL

SEQ ID NO: 7287 - protein, 9 aa, Artificial Sequence
  Description of Artificial Sequence: Synthetic peptide
AHCNISREL

SEQ ID NO: 7288 - protein, 9 aa, Artificial Sequence
  Description of Artificial Sequence: Synthetic peptide
AHTNDVKQL

SEQ ID NO: 7289 - protein, 8 aa, Artificial Sequence
  Description of Artificial Sequence: Synthetic peptide
EHFPNKAI

SEQ ID NO: 7290 - protein, 9 aa, Artificial Sequence
  Description of Artificial Sequence: Synthetic peptide
SQIYPGIQV

SEQ ID NO: 7291 - protein, 8 aa, Artificial Sequence
  Description of Artificial Sequence: Synthetic peptide
MHEDVISL

SEQ ID NO: 7292 - protein, 9 aa, Artificial Sequence
  Description of Artificial Sequence: Synthetic peptide
SQINNGNIM

SEQ ID NO: 7293 - protein, 9 aa, Artificial Sequence
  Description of Artificial Sequence: Synthetic peptide
SHNNSSPSP

SEQ ID NO: 7294 - protein, 9 aa, Artificial Sequence
  Description of Artificial Sequence: Synthetic peptide
LHISGSESA

SEQ ID NO: 7295 - protein, 9 aa, Artificial Sequence
  Description of Artificial Sequence: Synthetic peptide
SQIYPGIKV

SEQ ID NO: 7296 - protein, 9 aa, Artificial Sequence
  Description of Artificial Sequence: Synthetic peptide
IRIGPGQAF

SEQ ID NO: 7297 - protein, 9 aa, Artificial Sequence
  Description of Artificial Sequence: Synthetic peptide
TVLDVGDAY

SEQ ID NO: 7298 - protein, 9 aa, Artificial Sequence
  Description of Artificial Sequence: Synthetic peptide
TINEEAAEW

SEQ ID NO: 7299 - protein, 9 aa, Artificial Sequence
  Description of Artificial Sequence: Synthetic peptide
SAISLFDTI

SEQ ID NO: 7300 - protein, 9 aa, Artificial Sequence
  Description of Artificial Sequence: Synthetic peptide
TAVPWNSSW

SEQ ID NO: 7301 - protein, 8 aa, Artificial Sequence
  Description of Artificial Sequence: Synthetic peptide
DEMKNCSF

SEQ ID NO: 7302 - protein, 9 aa, Artificial Sequence
  Description of Artificial Sequence: Synthetic peptide
EENSWVTVY

SEQ ID NO: 7303 - protein, 11 aa, Artificial Sequence
  Description of Artificial Sequence: Synthetic peptide
SEVNIVTDSQY

SEQ ID NO: 7304 - protein, 8 aa, Artificial Sequence
  Description of Artificial Sequence: Synthetic peptide
DEKVSQNF

SEQ ID NO: 7305 - protein, 8 aa, Artificial Sequence
  Description of Artificial Sequence: Synthetic peptide
LEITTHSF

SEQ ID NO: 7306 - protein, 8 aa, Artificial Sequence
  Description of Artificial Sequence: Synthetic peptide
LEVTTHSF

SEQ ID NO: 7307 - protein, 8 aa, Artificial Sequence
  Description of Artificial Sequence: Synthetic peptide
DEALLQAV

SEQ ID NO: 7308 - protein, 8 aa, Artificial Sequence
  Description of Artificial Sequence: Synthetic peptide
NETPGIRY

SEQ ID NO: 7309 - protein, 11 aa, Artificial Sequence
  Description of Artificial Sequence: Synthetic peptide
SEANIVTDSQY

SEQ ID NO: 7310 - protein, 8 aa, Artificial Sequence
  Description of Artificial Sequence: Synthetic peptide
DEALLKAV

SEQ ID NO: 7311 - protein, 9 aa, Artificial Sequence
  Description of Artificial Sequence: Synthetic peptide
TETNKTETF

SEQ ID NO: 7312 - protein, 8 aa, Artificial Sequence
  Description of Artificial Sequence: Synthetic peptide
LENVTESF

SEQ ID NO: 7313 - protein, 8 aa, Artificial Sequence
  Description of Artificial Sequence: Synthetic peptide
TEAKTTLF

SEQ ID NO: 7314 - protein, 8 aa, Artificial Sequence
  Description of Artificial Sequence: Synthetic peptide
MENVTENF

SEQ ID NO: 7315 - protein, 8 aa, Artificial Sequence
  Description of Artificial Sequence: Synthetic peptide
TELQAIQL

SEQ ID NO: 7316 - protein, 9 aa, Artificial Sequence
  Description of Artificial Sequence: Synthetic peptide
NEFNIPPVV

SEQ ID NO: 7317 - protein, 8 aa, Artificial Sequence
  Description of Artificial Sequence: Synthetic peptide
SERILSTF

SEQ ID NO: 7318 - protein, 8 aa, Artificial Sequence
  Description of Artificial Sequence: Synthetic peptide
PEIVIYQY

SEQ ID NO: 7319 - protein, 9 aa, Artificial Sequence
  Description of Artificial Sequence: Synthetic peptide
DEVGFPVRP

SEQ ID NO: 7320 - protein, 8 aa, Artificial Sequence
  Description of Artificial Sequence: Synthetic peptide
NEVLVWKF

SEQ ID NO: 7321 - protein, 9 aa, Artificial Sequence
  Description of Artificial Sequence: Synthetic peptide
TERVGNPVF

SEQ ID NO: 7322 - protein, 9 aa, Artificial Sequence
  Description of Artificial Sequence: Synthetic peptide
SEFNLPPIV

SEQ ID NO: 7323 - protein, 8 aa, Artificial Sequence
  Description of Artificial Sequence: Synthetic peptide
PEIAIYQY

SEQ ID NO: 7324 - protein, 8 aa, Artificial Sequence
  Description of Artificial Sequence: Synthetic peptide
PEIIIYQY

SEQ ID NO: 7325 - protein, 8 aa, Artificial Sequence
  Description of Artificial Sequence: Synthetic peptide
LENVTENF

SEQ ID NO: 7326 - protein, 8 aa, Artificial Sequence
  Description of Artificial Sequence: Synthetic peptide
NEFNIPPV

SEQ ID NO: 7327 - protein, 9 aa, Artificial Sequence
  Description of Artificial Sequence: Synthetic peptide
TEAVQKIAL

SEQ ID NO: 7328 - protein, 8 aa, Artificial Sequence
  Description of Artificial Sequence: Synthetic peptide
DEELLKAV

SEQ ID NO: 7329 - protein, 9 aa, Artificial Sequence
  Description of Artificial Sequence: Synthetic peptide
IRIGPGQTF

SEQ ID NO: 7330 - protein, 10 aa, Artificial Sequence
  Description of Artificial Sequence: Synthetic peptide
IRIGPGQAFY

SEQ ID NO: 7331 - protein, 9 aa, Artificial Sequence
  Description of Artificial Sequence: Synthetic peptide
IRIGPGQAF

SEQ ID NO: 7332 - protein, 10 aa, Artificial Sequence
  Description of Artificial Sequence: Synthetic peptide
SLFGSDPLST

SEQ ID NO: 7333 - protein, 10 aa, Artificial Sequence
  Description of Artificial Sequence: Synthetic peptide
VRQGYSPLSF

SEQ ID NO: 7334 - protein, 10 aa, Artificial Sequence
  Description of Artificial Sequence: Synthetic peptide
IRIGPGQTFY

SEQ ID NO: 7335 - protein, 10 aa, Artificial Sequence
  Description of Artificial Sequence: Synthetic peptide
YRSDIVPLEK

SEQ ID NO: 7336 - protein, 9 aa, Artificial Sequence
  Description of Artificial Sequence: Synthetic peptide
TRVLAIERY

SEQ ID NO: 7337 - protein, 9 aa, Artificial Sequence
  Description of Artificial Sequence: Synthetic peptide
ARVLAIERY

SEQ ID NO: 7338 - protein, 11 aa, Artificial Sequence
  Description of Artificial Sequence: Synthetic peptide
GIVQQQSNLLK

SEQ ID NO: 7339 - protein, 11 aa, Artificial Sequence
  Description of Artificial Sequence: Synthetic peptide
KGGLEGLIYSK

SEQ ID NO: 7340 - protein, 9 aa, Artificial Sequence
  Description of Artificial Sequence: Synthetic peptide
IRIGPGQVF

SEQ ID NO: 7341 - protein, 10 aa, Artificial Sequence
  Description of Artificial Sequence: Synthetic peptide
YFSVPLDEGF

SEQ ID NO: 7342 - protein, 10 aa, Artificial Sequence
  Description of Artificial Sequence: Synthetic peptide
EANIVTDSQY

SEQ ID NO: 7343 - protein, 9 aa, Artificial Sequence
  Description of Artificial Sequence: Synthetic peptide
SRIGPENPY

SEQ ID NO: 7344 - protein, 10 aa, Artificial Sequence
  Description of Artificial Sequence: Synthetic peptide
GGLEGLIWSK

SEQ ID NO: 7345 - protein, 10 aa, Artificial Sequence
  Description of Artificial Sequence: Synthetic peptide
IRIGPGQVFY

SEQ ID NO: 7346 - protein, 11 aa, Artificial Sequence
  Description of Artificial Sequence: Synthetic peptide
NGSNFISNTVK

SEQ ID NO: 7347 - protein, 9 aa, Artificial Sequence
  Description of Artificial Sequence: Synthetic peptide
VLFLDGINK

SEQ ID NO: 7348 - protein, 10 aa, Artificial Sequence
  Description of Artificial Sequence: Synthetic peptide
GGLEGLIYSK

SEQ ID NO: 7349 - protein, 10 aa, Artificial Sequence
  Description of Artificial Sequence: Synthetic peptide
GALDLSFFLK

SEQ ID NO: 7350 - protein, 9 aa, Artificial Sequence
  Description of Artificial Sequence: Synthetic peptide
ILGQVVSPR

SEQ ID NO: 7351 - protein, 11 aa, Artificial Sequence
  Description of Artificial Sequence: Synthetic peptide
ELWNNTLEQVK

SEQ ID NO: 7352 - protein, 11 aa, Artificial Sequence
  Description of Artificial Sequence: Synthetic peptide
SEANIVTDSQY

SEQ ID NO: 7353 - protein, 11 aa, Artificial Sequence
  Description of Artificial Sequence: Synthetic peptide
TRVDPGLADQL

SEQ ID NO: 7354 - protein, 11 aa, Artificial Sequence
  Description of Artificial Sequence: Synthetic peptide
YATGEIIGDIR

SEQ ID NO: 7355 - protein, 10 aa, Artificial Sequence
  Description of Artificial Sequence: Synthetic peptide
NQIIEQLISK

SEQ ID NO: 7356 - protein, 9 aa, Artificial Sequence
  Description of Artificial Sequence: Synthetic peptide
SRIGILPQR

SEQ ID NO: 7357 - protein, 10 aa, Artificial Sequence
  Description of Artificial Sequence: Synthetic peptide
GRSSLKGLQR

SEQ ID NO: 7358 - protein, 9 aa, Artificial Sequence
  Description of Artificial Sequence: Synthetic peptide
SRIGILRQR

SEQ ID NO: 7359 - protein, 9 aa, Artificial Sequence
  Description of Artificial Sequence: Synthetic peptide
GRIDYRLGV

SEQ ID NO: 7360 - protein, 9 aa, Artificial Sequence
  Description of Artificial Sequence: Synthetic peptide
IRIGPGQTF

SEQ ID NO: 7361 - protein, 9 aa, Artificial Sequence
  Description of Artificial Sequence: Synthetic peptide
GRAAELLGR

SEQ ID NO: 7362 - protein, 10 aa, Artificial Sequence
  Description of Artificial Sequence: Synthetic peptide
GRSSLRGIQR

SEQ ID NO: 7363 - protein, 9 aa, Artificial Sequence
  Description of Artificial Sequence: Synthetic peptide
IRIGPGQAF

SEQ ID NO: 7364 - protein, 9 aa, Artificial Sequence
  Description of Artificial Sequence: Synthetic peptide
ARVLAIERY

SEQ ID NO: 7365 - protein, 10 aa, Artificial Sequence
  Description of Artificial Sequence: Synthetic peptide
IRIGPGQTFY

SEQ ID NO: 7366 - protein, 10 aa, Artificial Sequence
  Description of Artificial Sequence: Synthetic peptide
IRIGPGQAFY

SEQ ID NO: 7367 - protein, 10 aa, Artificial Sequence
  Description of Artificial Sequence: Synthetic peptide
IRIGPGQVFY

SEQ ID NO: 7368 - protein, 10 aa, Artificial Sequence
  Description of Artificial Sequence: Synthetic peptide
GRPGNLLQNR

SEQ ID NO: 7369 - protein, 9 aa, Artificial Sequence
  Description of Artificial Sequence: Synthetic peptide
IRIGPGQVF

SEQ ID NO: 7370 - protein, 9 aa, Artificial Sequence
  Description of Artificial Sequence: Synthetic peptide
SRIGPENPY

SEQ ID NO: 7371 - protein, 9 aa, Artificial Sequence
  Description of Artificial Sequence: Synthetic peptide
EPIAGVETF

SEQ ID NO: 7372 - protein, 9 aa, Artificial Sequence
  Description of Artificial Sequence: Synthetic peptide
FPEGEAREF

SEQ ID NO: 7373 - protein, 9 aa, Artificial Sequence
  Description of Artificial Sequence: Synthetic peptide
EPIAEAETF

SEQ ID NO: 7374 - protein, 9 aa, Artificial Sequence
  Description of Artificial Sequence: Synthetic peptide
EPIAGAETF

SEQ ID NO: 7375 - protein, 11 aa, Artificial Sequence
  Description of Artificial Sequence: Synthetic peptide
IPAETGQETAY

SEQ ID NO: 7376 - protein, 9 aa, Artificial Sequence
  Description of Artificial Sequence: Synthetic peptide
APNPEIVIY

SEQ ID NO: 7377 - protein, 9 aa, Artificial Sequence
  Description of Artificial Sequence: Synthetic peptide
NPEIIIYQY

SEQ ID NO: 7378 - protein, 9 aa, Artificial Sequence
  Description of Artificial Sequence: Synthetic peptide
FPQGEAREF

SEQ ID NO: 7379 - protein, 9 aa, Artificial Sequence
  Description of Artificial Sequence: Synthetic peptide
NPEIVIYQY

SEQ ID NO: 7380 - protein, 9 aa, Artificial Sequence
  Description of Artificial Sequence: Synthetic peptide
NPEIAIYQY

SEQ ID NO: 7381 - protein, 9 aa, Artificial Sequence
  Description of Artificial Sequence: Synthetic peptide
DPNPQEIVM

SEQ ID NO: 7382 - protein, 9 aa, Artificial Sequence
  Description of Artificial Sequence: Synthetic peptide
QAKGLGISY

SEQ ID NO: 7383 - protein, 9 aa, Artificial Sequence
  Description of Artificial Sequence: Synthetic peptide
TVLDVGDAY

SEQ ID NO: 7384 - protein, 11 aa, Artificial Sequence
  Description of Artificial Sequence: Synthetic peptide
APNPEIVIYQY

SEQ ID NO: 7385 - protein, 8 aa, Artificial Sequence
  Description of Artificial Sequence: Synthetic peptide
TPGPGVRY

SEQ ID NO: 7386 - protein, 9 aa, Artificial Sequence
  Description of Artificial Sequence: Synthetic peptide
SPAIFQNSM

SEQ ID NO: 7387 - protein, 8 aa, Artificial Sequence
  Description of Artificial Sequence: Synthetic peptide
FPNKTIEF

SEQ ID NO: 7388 - protein, 9 aa, Artificial Sequence
  Description of Artificial Sequence: Synthetic peptide
PPVPVGDIY

SEQ ID NO: 7389 - protein, 11 aa, Artificial Sequence
  Description of Artificial Sequence: Synthetic peptide
LAFPEGEAREF

SEQ ID NO: 7390 - protein, 10 aa, Artificial Sequence
  Description of Artificial Sequence: Synthetic peptide
VPLEKNSSEY

SEQ ID NO: 7391 - protein, 10 aa, Artificial Sequence
  Description of Artificial Sequence: Synthetic peptide
VPLNNGSTDY

SEQ ID NO: 7392 - protein, 10 aa, Artificial Sequence
  Description of Artificial Sequence: Synthetic peptide
VPLDEGFRKY

SEQ ID NO: 7393 - protein, 10 aa, Artificial Sequence
  Description of Artificial Sequence: Synthetic peptide
NPPVPVGDIY

SEQ ID NO: 7394 - protein, 10 aa, Artificial Sequence
  Description of Artificial Sequence: Synthetic peptide
NPPIPVGDIY

SEQ ID NO: 7395 - protein, 9 aa, Artificial Sequence
  Description of Artificial Sequence: Synthetic peptide
EARLVITTY

SEQ ID NO: 7396 - protein, 9 aa, Artificial Sequence
  Description of Artificial Sequence: Synthetic peptide
SPAIFQSSM

SEQ ID NO: 7397 - protein, 9 aa, Artificial Sequence
  Description of Artificial Sequence: Synthetic peptide
DAYFSVPLY

SEQ ID NO: 7398 - protein, 10 aa, Artificial Sequence
  Description of Artificial Sequence: Synthetic peptide
EPIAGVETFY

SEQ ID NO: 7399 - protein, 8 aa, Artificial Sequence
  Description of Artificial Sequence: Synthetic peptide
FPNKAIKF

SEQ ID NO: 7400 - protein, 9 aa, Artificial Sequence
  Description of Artificial Sequence: Synthetic peptide
DANNNTITL

SEQ ID NO: 7401 - protein, 9 aa, Artificial Sequence
  Description of Artificial Sequence: Synthetic peptide
PPIPVGDIY

SEQ ID NO: 7402 - protein, 10 aa, Artificial Sequence
  Description of Artificial Sequence: Synthetic peptide
EANIVTDSQY

SEQ ID NO: 7403 - protein, 10 aa, Artificial Sequence
  Description of Artificial Sequence: Synthetic peptide
EPIAGAETFY

SEQ ID NO: 7404 - protein, 9 aa, Artificial Sequence
  Description of Artificial Sequence: Synthetic peptide
VPLTEEAEL

SEQ ID NO: 7405 - protein, 9 aa, Artificial Sequence
  Description of Artificial Sequence: Synthetic peptide
FPISPIETV

SEQ ID NO: 7406 - protein, 9 aa, Artificial Sequence
  Description of Artificial Sequence: Synthetic peptide
DPNPQEIVM

SEQ ID NO: 7407 - protein, 9 aa, Artificial Sequence
  Description of Artificial Sequence: Synthetic peptide
VPLTEEAEL

SEQ ID NO: 7408 - protein, 9 aa, Artificial Sequence
  Description of Artificial Sequence: Synthetic peptide
FPEGEAREF

SEQ ID NO: 7409 - protein, 9 aa, Artificial Sequence
  Description of Artificial Sequence: Synthetic peptide
DPNPQEMVL

SEQ ID NO: 7410 - protein, 9 aa, Artificial Sequence
  Description of Artificial Sequence: Synthetic peptide
QPDKSESEL

SEQ ID NO: 7411 - protein, 9 aa, Artificial Sequence
  Description of Artificial Sequence: Synthetic peptide
VAEGTDRIL

SEQ ID NO: 7412 - protein, 9 aa, Artificial Sequence
  Description of Artificial Sequence: Synthetic peptide
EPIAEAETF

SEQ ID NO: 7413 - protein, 9 aa, Artificial Sequence
  Description of Artificial Sequence: Synthetic peptide
FPQGEAREF

SEQ ID NO: 7414 - protein, 9 aa, Artificial Sequence
  Description of Artificial Sequence: Synthetic peptide
YSTRVDPGL

SEQ ID NO: 7415 - protein, 9 aa, Artificial Sequence
  Description of Artificial Sequence: Synthetic peptide
YSTQVDPGL

SEQ ID NO: 7416 - protein, 9 aa, Artificial Sequence
  Description of Artificial Sequence: Synthetic peptide
DPSPQELVL

SEQ ID NO: 7417 - protein, 9 aa, Artificial Sequence
  Description of Artificial Sequence: Synthetic peptide
EPIAGAETF

SEQ ID NO: 7418 - protein, 10 aa, Artificial Sequence
  Description of Artificial Sequence: Synthetic peptide
TPNPGGPDRL

SEQ ID NO: 7419 - protein, 8 aa, Artificial Sequence
  Description of Artificial Sequence: Synthetic peptide
YASVDYRL

SEQ ID NO: 7420 - protein, 9 aa, Artificial Sequence
  Description of Artificial Sequence: Synthetic peptide
YSTQVEPGL

SEQ ID NO: 7421 - protein, 10 aa, Artificial Sequence
  Description of Artificial Sequence: Synthetic peptide
YAPPIEGIIM

SEQ ID NO: 7422 - protein, 9 aa, Artificial Sequence
  Description of Artificial Sequence: Synthetic peptide
HPVPAGPIA

SEQ ID NO: 7423 - protein, 9 aa, Artificial Sequence
  Description of Artificial Sequence: Synthetic peptide
EPIAGVETF

SEQ ID NO: 7424 - protein, 9 aa, Artificial Sequence
  Description of Artificial Sequence: Synthetic peptide
FPISPIETV

SEQ ID NO: 7425 - protein, 9 aa, Artificial Sequence
  Description of Artificial Sequence: Synthetic peptide
FPEGEAREF

SEQ ID NO: 7426 - protein, 9 aa, Artificial Sequence
  Description of Artificial Sequence: Synthetic peptide
DPNPQEIVM

SEQ ID NO: 7427 - protein, 9 aa, Artificial Sequence
  Description of Artificial Sequence: Synthetic peptide
VPLTEEAEL

SEQ ID NO: 7428 - protein, 9 aa, Artificial Sequence
  Description of Artificial Sequence: Synthetic peptide
EPIAEAETF

SEQ ID NO: 7429 - protein, 9 aa, Artificial Sequence
  Description of Artificial Sequence: Synthetic peptide
DPNPQEMVL

SEQ ID NO: 7430 - protein, 9 aa, Artificial Sequence
  Description of Artificial Sequence: Synthetic peptide
FPISPIETV

SEQ ID NO: 7431 - protein, 9 aa, Artificial Sequence
  Description of Artificial Sequence: Synthetic peptide
DANNNTITL

SEQ ID NO: 7432 - protein, 9 aa, Artificial Sequence
  Description of Artificial Sequence: Synthetic peptide
FPQGEAREF

SEQ ID NO: 7433 - protein, 9 aa, Artificial Sequence
  Description of Artificial Sequence: Synthetic peptide
EPIAGAETF

SEQ ID NO: 7434 - protein, 9 aa, Artificial Sequence
  Description of Artificial Sequence: Synthetic peptide
HPVPAGPIA

SEQ ID NO: 7435 - protein, 9 aa, Artificial Sequence
  Description of Artificial Sequence: Synthetic peptide
HPVHAGPVA

SEQ ID NO: 7436 - protein, 11 aa, Artificial Sequence
  Description of Artificial Sequence: Synthetic peptide
VPLTEEAELEL

SEQ ID NO: 7437 - protein, 9 aa, Artificial Sequence
  Description of Artificial Sequence: Synthetic peptide
TAVVQKIAL

SEQ ID NO: 7438 - protein, 9 aa, Artificial Sequence
  Description of Artificial Sequence: Synthetic peptide
DPSPQELVL

SEQ ID NO: 7439 - protein, 9 aa, Artificial Sequence
  Description of Artificial Sequence: Synthetic peptide
TPQDLNTML

SEQ ID NO: 7440 - protein, 9 aa, Artificial Sequence
  Description of Artificial Sequence: Synthetic peptide
EPIAGVETF

SEQ ID NO: 7441 - protein, 9 aa, Artificial Sequence
  Description of Artificial Sequence: Synthetic peptide
YSTQVDPGL

SEQ ID NO: 7442 - protein, 11 aa, Artificial Sequence
  Description of Artificial Sequence: Synthetic peptide
IAVAEGTDRIL

SEQ ID NO: 7443 - protein, 9 aa, Artificial Sequence
  Description of Artificial Sequence: Synthetic peptide
VAEGTDRIL

SEQ ID NO: 7444 - protein, 9 aa, Artificial Sequence
  Description of Artificial Sequence: Synthetic peptide
YSTRVDPGL

SEQ ID NO: 7445 - protein, 9 aa, Artificial Sequence
  Description of Artificial Sequence: Synthetic peptide
IVTDSQYAL

SEQ ID NO: 7446 - protein, 10 aa, Artificial Sequence
  Description of Artificial Sequence: Synthetic peptide
SPIETVPVKL

SEQ ID NO: 7447 - protein, 8 aa, Artificial Sequence
  Description of Artificial Sequence: Synthetic peptide
PPIEGIIM

SEQ ID NO: 7448 - protein, 10 aa, Artificial Sequence
  Description of Artificial Sequence: Synthetic peptide
VPTDPSPQEL

SEQ ID NO: 7449 - protein, 9 aa, Artificial Sequence
  Description of Artificial Sequence: Synthetic peptide
SPAIFQNSM

SEQ ID NO: 7450 - protein, 8 aa, Artificial Sequence
  Description of Artificial Sequence: Synthetic peptide
YASVDYRL

SEQ ID NO: 7451 - protein, 10 aa, Artificial Sequence
  Description of Artificial Sequence: Synthetic peptide
TPNPGGPDRL

SEQ ID NO: 7452 - protein, 10 aa, Artificial Sequence
  Description of Artificial Sequence: Synthetic peptide
NANPDCKTIL

SEQ ID NO: 7453 - protein, 8 aa, Artificial Sequence
  Description of Artificial Sequence: Synthetic peptide
FPNKTIEF

SEQ ID NO: 7454 - protein, 8 aa, Artificial Sequence
  Description of Artificial Sequence: Synthetic peptide
TPGPGVRL

SEQ ID NO: 7455 - protein, 10 aa, Artificial Sequence
  Description of Artificial Sequence: Synthetic peptide
VPTDPNPQEM

SEQ ID NO: 7456 - protein, 9 aa, Artificial Sequence
  Description of Artificial Sequence: Synthetic peptide
YNTQVDPGL

SEQ ID NO: 7457 - protein, 9 aa, Artificial Sequence
  Description of Artificial Sequence: Synthetic peptide
QPDKSESEL

SEQ ID NO: 7458 - protein, 9 aa, Artificial Sequence
  Description of Artificial Sequence: Synthetic peptide
FPEGEAREF

SEQ ID NO: 7459 - protein, 11 aa, Artificial Sequence
  Description of Artificial Sequence: Synthetic peptide
IPAETGQETAY

SEQ ID NO: 7460 - protein, 9 aa, Artificial Sequence
  Description of Artificial Sequence: Synthetic peptide
EPIAEAETF

SEQ ID NO: 7461 - protein, 9 aa, Artificial Sequence
  Description of Artificial Sequence: Synthetic peptide
DPNPQEIVM

SEQ ID NO: 7462 - protein, 9 aa, Artificial Sequence
  Description of Artificial Sequence: Synthetic peptide
APNPEIVIY

SEQ ID NO: 7463 - protein, 9 aa, Artificial Sequence
  Description of Artificial Sequence: Synthetic peptide
FPQGEAREF

SEQ ID NO: 7464 - protein, 9 aa, Artificial Sequence
  Description of Artificial Sequence: Synthetic peptide
EPIAGVETF

SEQ ID NO: 7465 - protein, 9 aa, Artificial Sequence
  Description of Artificial Sequence: Synthetic peptide
EPIAGAETF

SEQ ID NO: 7466 - protein, 9 aa, Artificial Sequence
  Description of Artificial Sequence: Synthetic peptide
NPEIAIYQY

SEQ ID NO: 7467 - protein, 10 aa, Artificial Sequence
  Description of Artificial Sequence: Synthetic peptide
NPPIPVGDIY

SEQ ID NO: 7468 - protein, 9 aa, Artificial Sequence
  Description of Artificial Sequence: Synthetic peptide
NPEIIIYQY

SEQ ID NO: 7469 - protein, 9 aa, Artificial Sequence
  Description of Artificial Sequence: Synthetic peptide
NPEIVIYQY

SEQ ID NO: 7470 - protein, 9 aa, Artificial Sequence
  Description of Artificial Sequence: Synthetic peptide
VPLTEEAEL

SEQ ID NO: 7471 - protein, 10 aa, Artificial Sequence
  Description of Artificial Sequence: Synthetic peptide
NPPVPVGDIY

SEQ ID NO: 7472 - protein, 10 aa, Artificial Sequence
  Description of Artificial Sequence: Synthetic peptide
EPIAEAETFY

SEQ ID NO: 7473 - protein, 9 aa, Artificial Sequence
  Description of Artificial Sequence: Synthetic peptide
PPIPVGDIY

SEQ ID NO: 7474 - protein, 8 aa, Artificial Sequence
  Description of Artificial Sequence: Synthetic peptide
TPGPGVRY

SEQ ID NO: 7475 - protein, 9 aa, Artificial Sequence
  Description of Artificial Sequence: Synthetic peptide
TVLDVGDAY

SEQ ID NO: 7476 - protein, 9 aa, Artificial Sequence
  Description of Artificial Sequence: Synthetic peptide
PPVPVGDIY

SEQ ID NO: 7477 - protein, 9 aa, Artificial Sequence
  Description of Artificial Sequence: Synthetic peptide
APPIEGIIM

SEQ ID NO: 7478 - protein, 9 aa, Artificial Sequence
  Description of Artificial Sequence: Synthetic peptide
FPEGEAREF

SEQ ID NO: 7479 - protein, 9 aa, Artificial Sequence
  Description of Artificial Sequence: Synthetic peptide
DPNPQEIVM

SEQ ID NO: 7480 - protein, 9 aa, Artificial Sequence
  Description of Artificial Sequence: Synthetic peptide
VPLTEEAEL

SEQ ID NO: 7481 - protein, 9 aa, Artificial Sequence
  Description of Artificial Sequence: Synthetic peptide
DPNPQEMVL

SEQ ID NO: 7482 - protein, 9 aa, Artificial Sequence
  Description of Artificial Sequence: Synthetic peptide
EPIAEAETF

SEQ ID NO: 7483 - protein, 9 aa, Artificial Sequence
  Description of Artificial Sequence: Synthetic peptide
QPDKSESEL

SEQ ID NO: 7484 - protein, 9 aa, Artificial Sequence
  Description of Artificial Sequence: Synthetic peptide
FPQGEAREF

SEQ ID NO: 7485 - protein, 9 aa, Artificial Sequence
  Description of Artificial Sequence: Synthetic peptide
DPSPQELVL

SEQ ID NO: 7486 - protein, 10 aa, Artificial Sequence
  Description of Artificial Sequence: Synthetic peptide
TPNPGGPDRL

SEQ ID NO: 7487 - protein, 9 aa, Artificial Sequence
  Description of Artificial Sequence: Synthetic peptide
VAEGTDRIL

SEQ ID NO: 7488 - protein, 8 aa, Artificial Sequence
  Description of Artificial Sequence: Synthetic peptide
YASVDYRL

SEQ ID NO: 7489 - protein, 9 aa, Artificial Sequence
  Description of Artificial Sequence: Synthetic peptide
EPIAGAETF

SEQ ID NO: 7490 - protein, 9 aa, Artificial Sequence
  Description of Artificial Sequence: Synthetic peptide
YSTRVDPGL

SEQ ID NO: 7491 - protein, 9 aa, Artificial Sequence
  Description of Artificial Sequence: Synthetic peptide
EPIAGVETF

SEQ ID NO: 7492 - protein, 11 aa, Artificial Sequence
  Description of Artificial Sequence: Synthetic peptide
VPLTEEAELEL

SEQ ID NO: 7493 - protein, 9 aa, Artificial Sequence
  Description of Artificial Sequence: Synthetic peptide
FPISPIETV

SEQ ID NO: 7494 - protein, 9 aa, Artificial Sequence
  Description of Artificial Sequence: Synthetic peptide
YSTQVDPGL

SEQ ID NO: 7495 - protein, 9 aa, Artificial Sequence
  Description of Artificial Sequence: Synthetic peptide
DTVLEEVSL

SEQ ID NO: 7496 - protein, 9 aa, Artificial Sequence
  Description of Artificial Sequence: Synthetic peptide
HPVHAGPVA

SEQ ID NO: 7497 - protein, 9 aa, Artificial Sequence
  Description of Artificial Sequence: Synthetic peptide
HPVPAGPIA

SEQ ID NO: 7498 - protein, 9 aa, Artificial Sequence
  Description of Artificial Sequence: Synthetic peptide
QPNKSESEL

SEQ ID NO: 7499 - protein, 8 aa, Artificial Sequence
  Description of Artificial Sequence: Synthetic peptide
MENVTENF

SEQ ID NO: 7500 - protein, 9 aa, Artificial Sequence
  Description of Artificial Sequence: Synthetic peptide
QDLDRYGAL

SEQ ID NO: 7501 - protein, 9 aa, Artificial Sequence
  Description of Artificial Sequence: Synthetic peptide
AELLGRSSL

SEQ ID NO: 7502 - protein, 8 aa, Artificial Sequence
  Description of Artificial Sequence: Synthetic peptide
YDAEVHNV

SEQ ID NO: 7503 - protein, 8 aa, Artificial Sequence
  Description of Artificial Sequence: Synthetic peptide
YDTEVHNV

SEQ ID NO: 7504 - protein, 8 aa, Artificial Sequence
  Description of Artificial Sequence: Synthetic peptide
AEHLKTAV

SEQ ID NO: 7505 - protein, 8 aa, Artificial Sequence
  Description of Artificial Sequence: Synthetic peptide
AELQAIQL

SEQ ID NO: 7506 - protein, 8 aa, Artificial Sequence
  Description of Artificial Sequence: Synthetic peptide
LENVTESF

SEQ ID NO: 7507 - protein, 8 aa, Artificial Sequence
  Description of Artificial Sequence: Synthetic peptide
LENVTENF

SEQ ID NO: 7508 - protein, 11 aa, Artificial Sequence
  Description of Artificial Sequence: Synthetic peptide
SEAGAERQGTF

SEQ ID NO: 7509 - protein, 9 aa, Artificial Sequence
  Description of Artificial Sequence: Synthetic peptide
TEAVQKIAL

SEQ ID NO: 7510 - protein, 9 aa, Artificial Sequence
  Description of Artificial Sequence: Synthetic peptide
TDNVKTIIV

SEQ ID NO: 7511 - protein, 8 aa, Artificial Sequence
  Description of Artificial Sequence: Synthetic peptide
SDIQTKEL

SEQ ID NO: 7512 - protein, 9 aa, Artificial Sequence
  Description of Artificial Sequence: Synthetic peptide
AERQGTFNF

SEQ ID NO: 7513 - protein, 9 aa, Artificial Sequence
  Description of Artificial Sequence: Synthetic peptide
VHLNESVEI

SEQ ID NO: 7514 - protein, 9 aa, Artificial Sequence
  Description of Artificial Sequence: Synthetic peptide
IHTDNGSNF

SEQ ID NO: 7515 - protein, 11 aa, Artificial Sequence
  Description of Artificial Sequence: Synthetic peptide
TQVDPGLADQL

SEQ ID NO: 7516 - protein, 10 aa, Artificial Sequence
  Description of Artificial Sequence: Synthetic peptide
IHTDNGSNFI

SEQ ID NO: 7517 - protein, 9 aa, Artificial Sequence
  Description of Artificial Sequence: Synthetic peptide
EHFPNKTII

SEQ ID NO: 7518 - protein, 9 aa, Artificial Sequence
  Description of Artificial Sequence: Synthetic peptide
IRIGPGQTF

SEQ ID NO: 7519 - protein, 11 aa, Artificial Sequence
  Description of Artificial Sequence: Synthetic peptide
TQVDPGLADHL

SEQ ID NO: 7520 - protein, 11 aa, Artificial Sequence
  Description of Artificial Sequence: Synthetic peptide
TQVEPGLADQL

SEQ ID NO: 7521 - protein, 9 aa, Artificial Sequence
  Description of Artificial Sequence: Synthetic peptide
TQDFWEVQL

SEQ ID NO: 7522 - protein, 9 aa, Artificial Sequence
  Description of Artificial Sequence: Synthetic peptide
VHLNQPVEI

SEQ ID NO: 7523 - protein, 11 aa, Artificial Sequence
  Description of Artificial Sequence: Synthetic peptide
TRVDPGLADQL

SEQ ID NO: 7524 - protein, 9 aa, Artificial Sequence
  Description of Artificial Sequence: Synthetic peptide
KHSGGDLEI

SEQ ID NO: 7525 - protein, 9 aa, Artificial Sequence
  Description of Artificial Sequence: Synthetic peptide
GHQAAMQML

SEQ ID NO: 7526 - protein, 10 aa, Artificial Sequence
  Description of Artificial Sequence: Synthetic peptide
EHFQNKTIEF

SEQ ID NO: 7527 - protein, 9 aa, Artificial Sequence
  Description of Artificial Sequence: Synthetic peptide
IRIGPGQAF

SEQ ID NO: 7528 - protein, 9 aa, Artificial Sequence
  Description of Artificial Sequence: Synthetic peptide
THLEGKIIL

SEQ ID NO: 7529 - protein, 9 aa, Artificial Sequence
  Description of Artificial Sequence: Synthetic peptide
AHTNDVKQL

SEQ ID NO: 7530 - protein, 9 aa, Artificial Sequence
  Description of Artificial Sequence: Synthetic peptide
EHLKTAVQM

SEQ ID NO: 7531 - protein, 9 aa, Artificial Sequence
  Description of Artificial Sequence: Synthetic peptide
AHTNDVRQL

SEQ ID NO: 7532 - protein, 10 aa, Artificial Sequence
  Description of Artificial Sequence: Synthetic peptide
THSKTYNESM

SEQ ID NO: 7533 - protein, 9 aa, Artificial Sequence
  Description of Artificial Sequence: Synthetic peptide
SQIYPGIQV

SEQ ID NO: 7534 - protein, 11 aa, Artificial Sequence
  Description of Artificial Sequence: Synthetic peptide
TRVDPGLADQL

SEQ ID NO: 7535 - protein, 11 aa, Artificial Sequence
  Description of Artificial Sequence: Synthetic peptide
TQVDPGLADQL

SEQ ID NO: 7536 - protein, 9 aa, Artificial Sequence
  Description of Artificial Sequence: Synthetic peptide
SQINNGNIM

SEQ ID NO: 7537 - protein, 11 aa, Artificial Sequence
  Description of Artificial Sequence: Synthetic peptide
VHAGPVAPGQM

SEQ ID NO: 7538 - protein, 9 aa, Artificial Sequence
  Description of Artificial Sequence: Synthetic peptide
EHLKTAVQM

SEQ ID NO: 7539 - protein, 9 aa, Artificial Sequence
  Description of Artificial Sequence: Synthetic peptide
EHFPNKTII

SEQ ID NO: 7540 - protein, 11 aa, Artificial Sequence
  Description of Artificial Sequence: Synthetic peptide
TQVEPGLADQL

SEQ ID NO: 7541 - protein, 8 aa, Artificial Sequence
  Description of Artificial Sequence: Synthetic peptide
FGSDPLST

SEQ ID NO: 7542 - protein, 11 aa, Artificial Sequence
  Description of Artificial Sequence: Synthetic peptide
TQVDPGLADHL

SEQ ID NO: 7543 - protein, 9 aa, Artificial Sequence
  Description of Artificial Sequence: Synthetic peptide
IRIGPGQTF

SEQ ID NO: 7544 - protein, 9 aa, Artificial Sequence
  Description of Artificial Sequence: Synthetic peptide
IRIGPGQAF

SEQ ID NO: 7545 - protein, 8 aa, Artificial Sequence
  Description of Artificial Sequence: Synthetic peptide
MHEDVISL

SEQ ID NO: 7546 - protein, 9 aa, Artificial Sequence
  Description of Artificial Sequence: Synthetic peptide
IHTDNGSNF

SEQ ID NO: 7547 - protein, 9 aa, Artificial Sequence
  Description of Artificial Sequence: Synthetic peptide
SQVNNTTIM

SEQ ID NO: 7548 - protein, 9 aa, Artificial Sequence
  Description of Artificial Sequence: Synthetic peptide
SQTNSAILM

SEQ ID NO: 7549 - protein, 9 aa, Artificial Sequence
  Description of Artificial Sequence: Synthetic peptide
HQAISPRTL

SEQ ID NO: 7550 - protein, 9 aa, Artificial Sequence
  Description of Artificial Sequence: Synthetic peptide
VHLNQPVEI

SEQ ID NO: 7551 - protein, 8 aa, Artificial Sequence
  Description of Artificial Sequence: Synthetic peptide
HRAPIEEL

SEQ ID NO: 7552 - protein, 9 aa, Artificial Sequence
  Description of Artificial Sequence: Synthetic peptide
QMVHQPISA

SEQ ID NO: 7553 - protein, 10 aa, Artificial Sequence
  Description of Artificial Sequence: Synthetic peptide
GQMVHQPISA

SEQ ID NO: 7554 - protein, 10 aa, Artificial Sequence
  Description of Artificial Sequence: Synthetic peptide
SQYALGIIQA

SEQ ID NO: 7555 - protein, 9 aa, Artificial Sequence
  Description of Artificial Sequence: Synthetic peptide
VQLGIPHPA

SEQ ID NO: 7556 - protein, 8 aa, Artificial Sequence
  Description of Artificial Sequence: Synthetic peptide
THGIKPVV

SEQ ID NO: 7557 - protein, 8 aa, Artificial Sequence
  Description of Artificial Sequence: Synthetic peptide
DRIAIAVA

SEQ ID NO: 7558 - protein, 10 aa, Artificial Sequence
  Description of Artificial Sequence: Synthetic peptide
SQYALGIILA

SEQ ID NO: 7559 - protein, 8 aa, Artificial Sequence
  Description of Artificial Sequence: Synthetic peptide
DQIIIEIC

SEQ ID NO: 7560 - protein, 8 aa, Artificial Sequence
  Description of Artificial Sequence: Synthetic peptide
EHFPNKAI

SEQ ID NO: 7561 - protein, 8 aa, Artificial Sequence
  Description of Artificial Sequence: Synthetic peptide
VHIPLGEA

SEQ ID NO: 7562 - protein, 9 aa, Artificial Sequence
  Description of Artificial Sequence: Synthetic peptide
LHISGSESA

SEQ ID NO: 7563 - protein, 9 aa, Artificial Sequence
  Description of Artificial Sequence: Synthetic peptide
EHFPNKTII

SEQ ID NO: 7564 - protein, 8 aa, Artificial Sequence
  Description of Artificial Sequence: Synthetic peptide
DQILIEIC

SEQ ID NO: 7565 - protein, 9 aa, Artificial Sequence
  Description of Artificial Sequence: Synthetic peptide
YQLEKEPIA

SEQ ID NO: 7566 - protein, 8 aa, Artificial Sequence
  Description of Artificial Sequence: Synthetic peptide
SNFISNTV

SEQ ID NO: 7567 - protein, 8 aa, Artificial Sequence
  Description of Artificial Sequence: Synthetic peptide
QHMLQLTV

SEQ ID NO: 7568 - protein, 9 aa, Artificial Sequence
  Description of Artificial Sequence: Synthetic peptide
TSNLFNITA

SEQ ID NO: 7569 - protein, 9 aa, Artificial Sequence
  Description of Artificial Sequence: Synthetic peptide
QQHLLQLTV

SEQ ID NO: 7570 - protein, 9 aa, Artificial Sequence
  Description of Artificial Sequence: Synthetic peptide
VHLNQPVEI

SEQ ID NO: 7571 - protein, 8 aa, Artificial Sequence
  Description of Artificial Sequence: Synthetic peptide
THGTKPVV

SEQ ID NO: 7572 - protein, 9 aa, Artificial Sequence
  Description of Artificial Sequence: Synthetic peptide
TEAVQKIAL

SEQ ID NO: 7573 - protein, 10 aa, Artificial Sequence
  Description of Artificial Sequence: Synthetic peptide
IEIKDTKEAL

SEQ ID NO: 7574 - protein, 10 aa, Artificial Sequence
  Description of Artificial Sequence: Synthetic peptide
SETTNQKAEL

SEQ ID NO: 7575 - protein, 10 aa, Artificial Sequence
  Description of Artificial Sequence: Synthetic peptide
TETTNQKTEL

SEQ ID NO: 7576 - protein, 9 aa, Artificial Sequence
  Description of Artificial Sequence: Synthetic peptide
MEDEHREVL

SEQ ID NO: 7577 - protein, 9 aa, Artificial Sequence
  Description of Artificial Sequence: Synthetic peptide
MEDEDREVL

SEQ ID NO: 7578 - protein, 9 aa, Artificial Sequence
  Description of Artificial Sequence: Synthetic peptide
MEDDHNEVL

SEQ ID NO: 7579 - protein, 9 aa, Artificial Sequence
  Description of Artificial Sequence: Synthetic peptide
MEDSHREVL

SEQ ID NO: 7580 - protein, 9 aa, Artificial Sequence
  Description of Artificial Sequence: Synthetic peptide
SEDKWNETL

SEQ ID NO: 7581 - protein, 10 aa, Artificial Sequence
  Description of Artificial Sequence: Synthetic peptide
IEVRDTKEAL

SEQ ID NO: 7582 - protein, 9 aa, Artificial Sequence
  Description of Artificial Sequence: Synthetic peptide
AELLGRSSL

SEQ ID NO: 7583 - protein, 10 aa, Artificial Sequence
  Description of Artificial Sequence: Synthetic peptide
GEIIIRSENL

SEQ ID NO: 7584 - protein, 9 aa, Artificial Sequence
  Description of Artificial Sequence: Synthetic peptide
AEGETIIRF

SEQ ID NO: 7585 - protein, 9 aa, Artificial Sequence
  Description of Artificial Sequence: Synthetic peptide
QEENEKDLL

SEQ ID NO: 7586 - protein, 9 aa, Artificial Sequence
  Description of Artificial Sequence: Synthetic peptide
SEGATPQDL

SEQ ID NO: 7587 - protein, 8 aa, Artificial Sequence
  Description of Artificial Sequence: Synthetic peptide
AELQAIQL

SEQ ID NO: 7588 - protein, 8 aa, Artificial Sequence
  Description of Artificial Sequence: Synthetic peptide
IETVPVKL

SEQ ID NO: 7589 - protein, 11 aa, Artificial Sequence
  Description of Artificial Sequence: Synthetic peptide
SEAGAERQGSL

SEQ ID NO: 7590 - protein, 10 aa, Artificial Sequence
  Description of Artificial Sequence: Synthetic peptide
AEGTDRILEL

SEQ ID NO: 7591 - protein, 9 aa, Artificial Sequence
  Description of Artificial Sequence: Synthetic peptide
TETNKTETF

SEQ ID NO: 7592 - protein, 9 aa, Artificial Sequence
  Description of Artificial Sequence: Synthetic peptide
QEKNEQDLL

SEQ ID NO: 7593 - protein, 11 aa, Artificial Sequence
  Description of Artificial Sequence: Synthetic peptide
SEIVNQIIEQL

SEQ ID NO: 7594 - protein, 11 aa, Artificial Sequence
  Description of Artificial Sequence: Synthetic peptide
EEINEGENNCL

SEQ ID NO: 7595 - protein, 8 aa, Artificial Sequence
  Description of Artificial Sequence: Synthetic peptide
TELQAIQL

SEQ ID NO: 7596 - protein, 9 aa, Artificial Sequence
  Description of Artificial Sequence: Synthetic peptide
VEPGLADQL

SEQ ID NO: 7597 - protein, 8 aa, Artificial Sequence
  Description of Artificial Sequence: Synthetic peptide
IEAQQHML

SEQ ID NO: 7598 - protein, 10 aa, Artificial Sequence
  Description of Artificial Sequence: Synthetic peptide
IEAQQHLLQL

SEQ ID NO: 7599 - protein, 9 aa, Artificial Sequence
  Description of Artificial Sequence: Synthetic peptide
VELLGRSSL

SEQ ID NO: 7600 - protein, 9 aa, Artificial Sequence
  Description of Artificial Sequence: Synthetic peptide
SESEIVNQI

SEQ ID NO: 7601 - protein, 10 aa, Artificial Sequence
  Description of Artificial Sequence: Synthetic peptide
IEAQQHMLQL

SEQ ID NO: 7602 - protein, 9 aa, Artificial Sequence
  Description of Artificial Sequence: Synthetic peptide
SEFNLPPIV

SEQ ID NO: 7603 - protein, 10 aa, Artificial Sequence
  Description of Artificial Sequence: Synthetic peptide
LEEKGGLEGL

SEQ ID NO: 7604 - protein, 10 aa, Artificial Sequence
  Description of Artificial Sequence: Synthetic peptide
AEHLKTAVQM

SEQ ID NO: 7605 - protein, 11 aa, Artificial Sequence
  Description of Artificial Sequence: Synthetic peptide
IEFQPPAGGDL

SEQ ID NO: 7606 - protein, 11 aa, Artificial Sequence
  Description of Artificial Sequence: Synthetic peptide
EEATPSPKQEL

SEQ ID NO: 7607 - protein, 9 aa, Artificial Sequence
  Description of Artificial Sequence: Synthetic peptide
GEENSWVTV

SEQ ID NO: 7608 - protein, 8 aa, Artificial Sequence
  Description of Artificial Sequence: Synthetic peptide
IEAQQHLL

SEQ ID NO: 7609 - protein, 10 aa, Artificial Sequence
  Description of Artificial Sequence: Synthetic peptide
KEPIAGVETF

SEQ ID NO: 7610 - protein, 11 aa, Artificial Sequence
  Description of Artificial Sequence: Synthetic peptide
IEFKPSSGGDL

SEQ ID NO: 7611 - protein, 9 aa, Artificial Sequence
  Description of Artificial Sequence: Synthetic peptide
WENDMVEQM

SEQ ID NO: 7612 - protein, 10 aa, Artificial Sequence
  Description of Artificial Sequence: Synthetic peptide
KEPIAEAETF

SEQ ID NO: 7613 - protein, 9 aa, Artificial Sequence
  Description of Artificial Sequence: Synthetic peptide
QELKDREAL

SEQ ID NO: 7614 - protein, 11 aa, Artificial Sequence
  Description of Artificial Sequence: Synthetic peptide
EEANTGENNSL

SEQ ID NO: 7615 - protein, 9 aa, Artificial Sequence
  Description of Artificial Sequence: Synthetic peptide
TEAVQKIAL

SEQ ID NO: 7616 - protein, 10 aa, Artificial Sequence
  Description of Artificial Sequence: Synthetic peptide
GEIIGDIRQA

SEQ ID NO: 7617 - protein, 10 aa, Artificial Sequence
  Description of Artificial Sequence: Synthetic peptide
GEIIIRSENL

SEQ ID NO: 7618 - protein, 8 aa, Artificial Sequence
  Description of Artificial Sequence: Synthetic peptide
AELQAIQL

SEQ ID NO: 7619 - protein, 8 aa, Artificial Sequence
  Description of Artificial Sequence: Synthetic peptide
SDIQTKEL

SEQ ID NO: 7620 - protein, 9 aa, Artificial Sequence
  Description of Artificial Sequence: Synthetic peptide
SEFNLPPIV

SEQ ID NO: 7621 - protein, 10 aa, Artificial Sequence
  Description of Artificial Sequence: Synthetic peptide
TETTNQKTEL

SEQ ID NO: 7622 - protein, 9 aa, Artificial Sequence
  Description of Artificial Sequence: Synthetic peptide
AELLGRSSL

SEQ ID NO: 7623 - protein, 10 aa, Artificial Sequence
  Description of Artificial Sequence: Synthetic peptide
SETTNQKAEL

SEQ ID NO: 7624 - protein, 10 aa, Artificial Sequence
  Description of Artificial Sequence: Synthetic peptide
IEIKDTKEAL

SEQ ID NO: 7625 - protein, 9 aa, Artificial Sequence
  Description of Artificial Sequence: Synthetic peptide
AEGETIIRF

SEQ ID NO: 7626 - protein, 11 aa, Artificial Sequence
  Description of Artificial Sequence: Synthetic peptide
SEIVNQIIEQL

SEQ ID NO: 7627 - protein, 8 aa, Artificial Sequence
  Description of Artificial Sequence: Synthetic peptide
TDIQTKEL

SEQ ID NO: 7628 - protein, 8 aa, Artificial Sequence
  Description of Artificial Sequence: Synthetic peptide
IEAQQHML

SEQ ID NO: 7629 - protein, 10 aa, Artificial Sequence
  Description of Artificial Sequence: Synthetic peptide
AEHLKTAVQM

SEQ ID NO: 7630 - protein, 11 aa, Artificial Sequence
  Description of Artificial Sequence: Synthetic peptide
EEATPSPKQEL

SEQ ID NO: 7631 - protein, 9 aa, Artificial Sequence
  Description of Artificial Sequence: Synthetic peptide
NEFNIPPVV

SEQ ID NO: 7632 - protein, 9 aa, Artificial Sequence
  Description of Artificial Sequence: Synthetic peptide
MEDEHREVL

SEQ ID NO: 7633 - protein, 10 aa, Artificial Sequence
  Description of Artificial Sequence: Synthetic peptide
AEGTDRILEL

SEQ ID NO: 7634 - protein, 8 aa, Artificial Sequence
  Description of Artificial Sequence: Synthetic peptide
TELQAIQL

SEQ ID NO: 7635 - protein, 9 aa, Artificial Sequence
  Description of Artificial Sequence: Synthetic peptide
TETNKTETF

SEQ ID NO: 7636 - protein, 9 aa, Artificial Sequence
  Description of Artificial Sequence: Synthetic peptide
AEHFPNKAI

SEQ ID NO: 7637 - protein, 10 aa, Artificial Sequence
  Description of Artificial Sequence: Synthetic peptide
IEAQQHLLQL

SEQ ID NO: 7638 - protein, 9 aa, Artificial Sequence
  Description of Artificial Sequence: Synthetic peptide
TERVGNPVF

SEQ ID NO: 7639 - protein, 8 aa, Artificial Sequence
  Description of Artificial Sequence: Synthetic peptide
IETVPVKL

SEQ ID NO: 7640 - protein, 9 aa, Artificial Sequence
  Description of Artificial Sequence: Synthetic peptide
SESEIVNQI

SEQ ID NO: 7641 - protein, 9 aa, Artificial Sequence
  Description of Artificial Sequence: Synthetic peptide
MEDSHREVL

SEQ ID NO: 7642 - protein, 8 aa, Artificial Sequence
  Description of Artificial Sequence: Synthetic peptide
KELPLTSL

SEQ ID NO: 7643 - protein, 10 aa, Artificial Sequence
  Description of Artificial Sequence: Synthetic peptide
SEFNLPPIVA

SEQ ID NO: 7644 - protein, 10 aa, Artificial Sequence
  Description of Artificial Sequence: Synthetic peptide
IEAQQHMLQL

SEQ ID NO: 7645 - protein, 9 aa, Artificial Sequence
  Description of Artificial Sequence: Synthetic peptide
VELLGRSSL

SEQ ID NO: 7646 - protein, 10 aa, Artificial Sequence
  Description of Artificial Sequence: Synthetic peptide
REINNYTNTI

SEQ ID NO: 7647 - protein, 8 aa, Artificial Sequence
  Description of Artificial Sequence: Synthetic peptide
TELQAICL

SEQ ID NO: 7648 - protein, 10 aa, Artificial Sequence
  Description of Artificial Sequence: Synthetic peptide
REISNYTNTI

SEQ ID NO: 7649 - protein, 8 aa, Artificial Sequence
  Description of Artificial Sequence: Synthetic peptide
IEAQQHLL

SEQ ID NO: 7650 - protein, 9 aa, Artificial Sequence
  Description of Artificial Sequence: Synthetic peptide
SDFNLPPVV

SEQ ID NO: 7651 - protein, 9 aa, Artificial Sequence
  Description of Artificial Sequence: Synthetic peptide
SERILSTCL

SEQ ID NO: 7652 - protein, 10 aa, Artificial Sequence
  Description of Artificial Sequence: Synthetic peptide
IEVRDTKEAL

SEQ ID NO: 7653 - protein, 9 aa, Artificial Sequence
  Description of Artificial Sequence: Synthetic peptide
WENDMVEQM

SEQ ID NO: 7654 - protein, 9 aa, Artificial Sequence
  Description of Artificial Sequence: Synthetic peptide
MEDEDREVL

SEQ ID NO: 7655 - protein, 10 aa, Artificial Sequence
  Description of Artificial Sequence: Synthetic peptide
AELQAIQLAL

SEQ ID NO: 7656 - protein, 10 aa, Artificial Sequence
  Description of Artificial Sequence: Synthetic peptide
GEAIHGQVNC

SEQ ID NO: 7657 - protein, 11 aa, Artificial Sequence
  Description of Artificial Sequence: Synthetic peptide
SELVNQIIEQL

SEQ ID NO: 7658 - protein, 9 aa, Artificial Sequence
  Description of Artificial Sequence: Synthetic peptide
SEGATPQDL

SEQ ID NO: 7659 - protein, 11 aa, Artificial Sequence
  Description of Artificial Sequence: Synthetic peptide
VEALIRTLQQL

SEQ ID NO: 7660 - protein, 11 aa, Artificial Sequence
  Description of Artificial Sequence: Synthetic peptide
SEAGAERQGSL

SEQ ID NO: 7661 - protein, 11 aa, Artificial Sequence
  Description of Artificial Sequence: Synthetic peptide
VEQMHQDIISL

SEQ ID NO: 7662 - protein, 10 aa, Artificial Sequence
  Description of Artificial Sequence: Synthetic peptide
KEPIAGVETF

SEQ ID NO: 7663 - protein, 9 aa, Artificial Sequence
  Description of Artificial Sequence: Synthetic peptide
SESELVNQI

SEQ ID NO: 7664 - protein, 10 aa, Artificial Sequence
  Description of Artificial Sequence: Synthetic peptide
REFPSEQTRA

SEQ ID NO: 7665 - protein, 9 aa, Artificial Sequence
  Description of Artificial Sequence: Synthetic peptide
LEKEPIAGV

SEQ ID NO: 7666 - protein, 10 aa, Artificial Sequence
  Description of Artificial Sequence: Synthetic peptide
GEIIGDIRQA

SEQ ID NO: 7667 - protein, 10 aa, Artificial Sequence
  Description of Artificial Sequence: Synthetic peptide
REFSPEQTRA

SEQ ID NO: 7668 - protein, 10 aa, Artificial Sequence
  Description of Artificial Sequence: Synthetic peptide
REFPSEQTRA

SEQ ID NO: 7669 - protein, 10 aa, Artificial Sequence
  Description of Artificial Sequence: Synthetic peptide
SEFNLPPIVA

SEQ ID NO: 7670 - protein, 9 aa, Artificial Sequence
  Description of Artificial Sequence: Synthetic peptide
REFPPETRA

SEQ ID NO: 7671 - protein, 9 aa, Artificial Sequence
  Description of Artificial Sequence: Synthetic peptide
LEKEPIAGA

SEQ ID NO: 7672 - protein, 9 aa, Artificial Sequence
  Description of Artificial Sequence: Synthetic peptide
LEKEPIAEA

SEQ ID NO: 7673 - protein, 10 aa, Artificial Sequence
  Description of Artificial Sequence: Synthetic peptide
NEIIGNIRQA

SEQ ID NO: 7674 - protein, 9 aa, Artificial Sequence
  Description of Artificial Sequence: Synthetic peptide
IEIKDTKEA

SEQ ID NO: 7675 - protein, 9 aa, Artificial Sequence
  Description of Artificial Sequence: Synthetic peptide
SEFNLPPIV

SEQ ID NO: 7676 - protein, 9 aa, Artificial Sequence
  Description of Artificial Sequence: Synthetic peptide
KTIEFQPPA

SEQ ID NO: 7677 - protein, 9 aa, Artificial Sequence
  Description of Artificial Sequence: Synthetic peptide
TETLLVQNA

SEQ ID NO: 7678 - protein, 9 aa, Artificial Sequence
  Description of Artificial Sequence: Synthetic peptide
TENSIITIP

SEQ ID NO: 7679 - protein, 9 aa, Artificial Sequence
  Description of Artificial Sequence: Synthetic peptide
EEVGFPVRP

SEQ ID NO: 7680 - protein, 8 aa, Artificial Sequence
  Description of Artificial Sequence: Synthetic peptide
RDFILVAA

SEQ ID NO: 7681 - protein, 9 aa, Artificial Sequence
  Description of Artificial Sequence: Synthetic peptide
NEFNIPPVV

SEQ ID NO: 7682 - protein, 10 aa, Artificial Sequence
  Description of Artificial Sequence: Synthetic peptide
SEVHIPLGEA

SEQ ID NO: 7683 - protein, 10 aa, Artificial Sequence
  Description of Artificial Sequence: Synthetic peptide
VEVKPLGVAP

SEQ ID NO: 7684 - protein, 9 aa, Artificial Sequence
  Description of Artificial Sequence: Synthetic peptide
QEFGIPYNP

SEQ ID NO: 7685 - protein, 10 aa, Artificial Sequence
  Description of Artificial Sequence: Synthetic peptide
VEIKPLGVAP

SEQ ID NO: 7686 - protein, 10 aa, Artificial Sequence
  Description of Artificial Sequence: Synthetic peptide
SDFNLPPVVA

SEQ ID NO: 7687 - protein, 9 aa, Artificial Sequence
  Description of Artificial Sequence: Synthetic peptide
GENNSLLHP

SEQ ID NO: 7688 - protein, 9 aa, Artificial Sequence
  Description of Artificial Sequence: Synthetic peptide
AEGEIIIRS

SEQ ID NO: 7689 - protein, 9 aa, Artificial Sequence
  Description of Artificial Sequence: Synthetic peptide
AELQAIQLA

SEQ ID NO: 7690 - protein, 9 aa, Artificial Sequence
  Description of Artificial Sequence: Synthetic peptide
TEAVQKIAL

SEQ ID NO: 7691 - protein, 9 aa, Artificial Sequence
  Description of Artificial Sequence: Synthetic peptide
AELLGRSSL

SEQ ID NO: 7692 - protein, 9 aa, Artificial Sequence
  Description of Artificial Sequence: Synthetic peptide
MEDEHREVL

SEQ ID NO: 7693 - protein, 9 aa, Artificial Sequence
  Description of Artificial Sequence: Synthetic peptide
TERVGNPVF

SEQ ID NO: 7694 - protein, 8 aa, Artificial Sequence
  Description of Artificial Sequence: Synthetic peptide
SDIQTKEL

SEQ ID NO: 7695 - protein, 8 aa, Artificial Sequence
  Description of Artificial Sequence: Synthetic peptide
TDIQTKEL

SEQ ID NO: 7696 - protein, 9 aa, Artificial Sequence
  Description of Artificial Sequence: Synthetic peptide
MEDSHREVL

SEQ ID NO: 7697 - protein, 8 aa, Artificial Sequence
  Description of Artificial Sequence: Synthetic peptide
AELQAIQL

SEQ ID NO: 7698 - protein, 8 aa, Artificial Sequence
  Description of Artificial Sequence: Synthetic peptide
IEAQQHML

SEQ ID NO: 7699 - protein, 9 aa, Artificial Sequence
  Description of Artificial Sequence: Synthetic peptide
SERILSTCL

SEQ ID NO: 7700 - protein, 8 aa, Artificial Sequence
  Description of Artificial Sequence: Synthetic peptide
AEHLKTAV

SEQ ID NO: 7701 - protein, 9 aa, Artificial Sequence
  Description of Artificial Sequence: Synthetic peptide
MEDEDREVL

SEQ ID NO: 7702 - protein, 9 aa, Artificial Sequence
  Description of Artificial Sequence: Synthetic peptide
VELLGRSSL

SEQ ID NO: 7703 - protein, 9 aa, Artificial Sequence
  Description of Artificial Sequence: Synthetic peptide
AESAIRKAI

SEQ ID NO: 7704 - protein, 9 aa, Artificial Sequence
  Description of Artificial Sequence: Synthetic peptide
AEHFPNKAI

SEQ ID NO: 7705 - protein, 9 aa, Artificial Sequence
  Description of Artificial Sequence: Synthetic peptide
TETNKTETF

SEQ ID NO: 7706 - protein, 10 aa, Artificial Sequence
  Description of Artificial Sequence: Synthetic peptide
SETTNQKAEL

SEQ ID NO: 7707 - protein, 9 aa, Artificial Sequence
  Description of Artificial Sequence: Synthetic peptide
AEGETIIRF

SEQ ID NO: 7708 - protein, 10 aa, Artificial Sequence
  Description of Artificial Sequence: Synthetic peptide
TETTNQKTEL

SEQ ID NO: 7709 - protein, 9 aa, Artificial Sequence
  Description of Artificial Sequence: Synthetic peptide
QELKDREAL

SEQ ID NO: 7710 - protein, 8 aa, Artificial Sequence
  Description of Artificial Sequence: Synthetic peptide
TELQAIQL

SEQ ID NO: 7711 - protein, 8 aa, Artificial Sequence
  Description of Artificial Sequence: Synthetic peptide
KELPLTSL

SEQ ID NO: 7712 - protein, 8 aa, Artificial Sequence
  Description of Artificial Sequence: Synthetic peptide
TDLQTKEL

SEQ ID NO: 7713 - protein, 8 aa, Artificial Sequence
  Description of Artificial Sequence: Synthetic peptide
IEAQQHLL

SEQ ID NO: 7714 - protein, 9 aa, Artificial Sequence
  Description of Artificial Sequence: Synthetic peptide
QEKNEQDLL

SEQ ID NO: 7715 - protein, 9 aa, Artificial Sequence
  Description of Artificial Sequence: Synthetic peptide
LEKEPIAGV

SEQ ID NO: 7716 - protein, 9 aa, Artificial Sequence
  Description of Artificial Sequence: Synthetic peptide
AEHFPNKTI

SEQ ID NO: 7717 - protein, 9 aa, Artificial Sequence
  Description of Artificial Sequence: Synthetic peptide
KDREPLTSL

SEQ ID NO: 7718 - protein, 10 aa, Artificial Sequence
  Description of Artificial Sequence: Synthetic peptide
GEIIIRSENL

SEQ ID NO: 7719 - protein, 9 aa, Artificial Sequence
  Description of Artificial Sequence: Synthetic peptide
KEKGGLEGL

SEQ ID NO: 7720 - protein, 8 aa, Artificial Sequence
  Description of Artificial Sequence: Synthetic peptide
TELQAICL

SEQ ID NO: 7721 - protein, 9 aa, Artificial Sequence
  Description of Artificial Sequence: Synthetic peptide
GEQDRDRSI

SEQ ID NO: 7722 - protein, 9 aa, Artificial Sequence
  Description of Artificial Sequence: Synthetic peptide
AERQGTFNF

SEQ ID NO: 7723 - protein, 9 aa, Artificial Sequence
  Description of Artificial Sequence: Synthetic peptide
SERILSTCV

SEQ ID NO: 7724 - protein, 10 aa, Artificial Sequence
  Description of Artificial Sequence: Synthetic peptide
AEHLKTAVQM

SEQ ID NO: 7725 - protein, 9 aa, Artificial Sequence
  Description of Artificial Sequence: Synthetic peptide
KDREALTSL

SEQ ID NO: 7726 - protein, 8 aa, Artificial Sequence
  Description of Artificial Sequence: Synthetic peptide
TERQANFL

SEQ ID NO: 7727 - protein, 8 aa, Artificial Sequence
  Description of Artificial Sequence: Synthetic peptide
SEEKIKAL

SEQ ID NO: 7728 - protein, 9 aa, Artificial Sequence
  Description of Artificial Sequence: Synthetic peptide
QEKNEKDLL

SEQ ID NO: 7729 - protein, 10 aa, Artificial Sequence
  Description of Artificial Sequence: Synthetic peptide
IEIKDTKEAL

SEQ ID NO: 7730 - protein, 10 aa, Artificial Sequence
  Description of Artificial Sequence: Synthetic peptide
AEGTDRILEL

SEQ ID NO: 7731 - protein, 8 aa, Artificial Sequence
  Description of Artificial Sequence: Synthetic peptide
TDRLIEGL

SEQ ID NO: 7732 - protein, 8 aa, Artificial Sequence
  Description of Artificial Sequence: Synthetic peptide
SERILSTF

SEQ ID NO: 7733 - protein, 9 aa, Artificial Sequence
  Description of Artificial Sequence: Synthetic peptide
SEFNLPPIV

SEQ ID NO: 7734 - protein, 11 aa, Artificial Sequence
  Description of Artificial Sequence: Synthetic peptide
SEAGAERQGSL

SEQ ID NO: 7735 - protein, 8 aa, Artificial Sequence
  Description of Artificial Sequence: Synthetic peptide
VEALIRTL

SEQ ID NO: 7736 - protein, 9 aa, Artificial Sequence
  Description of Artificial Sequence: Synthetic peptide
AERQGSLNF

SEQ ID NO: 7737 - protein, 9 aa, Artificial Sequence
  Description of Artificial Sequence: Synthetic peptide
MEDDHNEVL

SEQ ID NO: 7738 - protein, 10 aa, Artificial Sequence
  Description of Artificial Sequence: Synthetic peptide
IDKELPLTSL

SEQ ID NO: 7739 - protein, 11 aa, Artificial Sequence
  Description of Artificial Sequence: Synthetic peptide
EEATPSPKQEL

SEQ ID NO: 7740 - protein, 10 aa, Artificial Sequence
  Description of Artificial Sequence: Synthetic peptide
AESAIRKAIL

SEQ ID NO: 7741 - protein, 9 aa, Artificial Sequence
  Description of Artificial Sequence: Synthetic peptide
ANSPTRREL

SEQ ID NO: 7742 - protein, 9 aa, Artificial Sequence
  Description of Artificial Sequence: Synthetic peptide
GEQDKDRSI

SEQ ID NO: 7743 - protein, 9 aa, Artificial Sequence
  Description of Artificial Sequence: Synthetic peptide
AEGETIIRF

SEQ ID NO: 7744 - protein, 11 aa, Artificial Sequence
  Description of Artificial Sequence: Synthetic peptide
AEQATQDVKNW

SEQ ID NO: 7745 - protein, 11 aa, Artificial Sequence
  Description of Artificial Sequence: Synthetic peptide
AEQATQEVKNW

SEQ ID NO: 7746 - protein, 11 aa, Artificial Sequence
  Description of Artificial Sequence: Synthetic peptide
SEANIVTDSQY

SEQ ID NO: 7747 - protein, 11 aa, Artificial Sequence
  Description of Artificial Sequence: Synthetic peptide
AEIQKQGQNQW

SEQ ID NO: 7748 - protein, 9 aa, Artificial Sequence
  Description of Artificial Sequence: Synthetic peptide
TETNKTETF

SEQ ID NO: 7749 - protein, 9 aa, Artificial Sequence
  Description of Artificial Sequence: Synthetic peptide
EEINLPGKW

SEQ ID NO: 7750 - protein, 11 aa, Artificial Sequence
  Description of Artificial Sequence: Synthetic peptide
SEVNIVTDSQY

SEQ ID NO: 7751 - protein, 9 aa, Artificial Sequence
  Description of Artificial Sequence: Synthetic peptide
AESAIRKAI

SEQ ID NO: 7752 - protein, 11 aa, Artificial Sequence
  Description of Artificial Sequence: Synthetic peptide
AEIQKQGQDQW

SEQ ID NO: 7753 - protein, 11 aa, Artificial Sequence
  Description of Artificial Sequence: Synthetic peptide
AEIQKQGNDQW

SEQ ID NO: 7754 - protein, 9 aa, Artificial Sequence
  Description of Artificial Sequence: Synthetic peptide
EEVSLPGKW

SEQ ID NO: 7755 - protein, 9 aa, Artificial Sequence
  Description of Artificial Sequence: Synthetic peptide
AEHFPNKAI

SEQ ID NO: 7756 - protein, 10 aa, Artificial Sequence
  Description of Artificial Sequence: Synthetic peptide
GEARLIIKTY

SEQ ID NO: 7757 - protein, 11 aa, Artificial Sequence
  Description of Artificial Sequence: Synthetic peptide
NEQDLLALDKW

SEQ ID NO: 7758 - protein, 9 aa, Artificial Sequence
  Description of Artificial Sequence: Synthetic peptide
EENSWVTVY

SEQ ID NO: 7759 - protein, 10 aa, Artificial Sequence
  Description of Artificial Sequence: Synthetic peptide
GEARLVITTY

SEQ ID NO: 7760 - protein, 9 aa, Artificial Sequence
  Description of Artificial Sequence: Synthetic peptide
SESEIVNQI

SEQ ID NO: 7761 - protein, 10 aa, Artificial Sequence
  Description of Artificial Sequence: Synthetic peptide
NETPGIRYQY

SEQ ID NO: 7762 - protein, 9 aa, Artificial Sequence
  Description of Artificial Sequence: Synthetic peptide
EEIWDNMTW

SEQ ID NO: 7763 - protein, 9 aa, Artificial Sequence
  Description of Artificial Sequence: Synthetic peptide
AELLGRSSL

SEQ ID NO: 7764 - protein, 10 aa, Artificial Sequence
  Description of Artificial Sequence: Synthetic peptide
GEARLVIKTY

SEQ ID NO: 7765 - protein, 9 aa, Artificial Sequence
  Description of Artificial Sequence: Synthetic peptide
AETGQETAY

SEQ ID NO: 7766 - protein, 9 aa, Artificial Sequence
  Description of Artificial Sequence: Synthetic peptide
AEHFPNKTI

SEQ ID NO: 7767 - protein, 10 aa, Artificial Sequence
  Description of Artificial Sequence: Synthetic peptide
QENDSNSSGY

SEQ ID NO: 7768 - protein, 11 aa, Artificial Sequence
  Description of Artificial Sequence: Synthetic peptide
NEKDLLALDSW

SEQ ID NO: 7769 - protein, 11 aa, Artificial Sequence
  Description of Artificial Sequence: Synthetic peptide
SEAGAERQGTF

SEQ ID NO: 7770 - protein, 9 aa, Artificial Sequence
  Description of Artificial Sequence: Synthetic peptide
AERQGTFNF

SEQ ID NO: 7771 - protein, 9 aa, Artificial Sequence
  Description of Artificial Sequence: Synthetic peptide
EEIKLPGNW

SEQ ID NO: 7772 - protein, 10 aa, Artificial Sequence
  Description of Artificial Sequence: Synthetic peptide
QEDIWNNMTW

SEQ ID NO: 7773 - protein, 9 aa, Artificial Sequence
  Description of Artificial Sequence: Synthetic peptide
AEGETIIRF

SEQ ID NO: 7774 - protein, 11 aa, Artificial Sequence
  Description of Artificial Sequence: Synthetic peptide
SEVNIVTDSQY

SEQ ID NO: 7775 - protein, 11 aa, Artificial Sequence
  Description of Artificial Sequence: Synthetic peptide
SEANIVTDSQY

SEQ ID NO: 7776 - protein, 11 aa, Artificial Sequence
  Description of Artificial Sequence: Synthetic peptide
AEQATQDVKNW

SEQ ID NO: 7777 - protein, 11 aa, Artificial Sequence
  Description of Artificial Sequence: Synthetic peptide
AEIQKQGQNQW

SEQ ID NO: 7778 - protein, 9 aa, Artificial Sequence
  Description of Artificial Sequence: Synthetic peptide
EEINLPGKW

SEQ ID NO: 7779 - protein, 11 aa, Artificial Sequence
  Description of Artificial Sequence: Synthetic peptide
AEQATQEVKNW

SEQ ID NO: 7780 - protein, 9 aa, Artificial Sequence
  Description of Artificial Sequence: Synthetic peptide
TETNKTETF

SEQ ID NO: 7781 - protein, 9 aa, Artificial Sequence
  Description of Artificial Sequence: Synthetic peptide
EEVSLPGKW

SEQ ID NO: 7782 - protein, 11 aa, Artificial Sequence
  Description of Artificial Sequence: Synthetic peptide
AEIQKQGQDQW

SEQ ID NO: 7783 - protein, 11 aa, Artificial Sequence
  Description of Artificial Sequence: Synthetic peptide
AEIQKQGNDQW

SEQ ID NO: 7784 - protein, 9 aa, Artificial Sequence
  Description of Artificial Sequence: Synthetic peptide
AESAIRKAI

SEQ ID NO: 7785 - protein, 10 aa, Artificial Sequence
  Description of Artificial Sequence: Synthetic peptide
GEARLIIKTY

SEQ ID NO: 7786 - protein, 9 aa, Artificial Sequence
  Description of Artificial Sequence: Synthetic peptide
SESEIVNQI

SEQ ID NO: 7787 - protein, 9 aa, Artificial Sequence
  Description of Artificial Sequence: Synthetic peptide
AEHFPNKAI

SEQ ID NO: 7788 - protein, 10 aa, Artificial Sequence
  Description of Artificial Sequence: Synthetic peptide
GEARLVITTY

SEQ ID NO: 7789 - protein, 10 aa, Artificial Sequence
  Description of Artificial Sequence: Synthetic peptide
GEARLVIKTY

SEQ ID NO: 7790 - protein, 10 aa, Artificial Sequence
  Description of Artificial Sequence: Synthetic peptide
NETPGIRYQY

SEQ ID NO: 7791 - protein, 9 aa, Artificial Sequence
  Description of Artificial Sequence: Synthetic peptide
AEHFPNKTI

SEQ ID NO: 7792 - protein, 9 aa, Artificial Sequence
  Description of Artificial Sequence: Synthetic peptide
EEIKLPGNW

SEQ ID NO: 7793 - protein, 10 aa, Artificial Sequence
  Description of Artificial Sequence: Synthetic peptide
GEARLVIITY

SEQ ID NO: 7794 - protein, 11 aa, Artificial Sequence
  Description of Artificial Sequence: Synthetic peptide
NEQDLLALDKW

SEQ ID NO: 7795 - protein, 9 aa, Artificial Sequence
  Description of Artificial Sequence: Synthetic peptide
SESELVNQI

SEQ ID NO: 7796 - protein, 9 aa, Artificial Sequence
  Description of Artificial Sequence: Synthetic peptide
EENSWVTVY

SEQ ID NO: 7797 - protein, 9 aa, Artificial Sequence
  Description of Artificial Sequence: Synthetic peptide
AELLGRSSL

SEQ ID NO: 7798 - protein, 11 aa, Artificial Sequence
  Description of Artificial Sequence: Synthetic peptide
SEAGAERQGTF

SEQ ID NO: 7799 - protein, 11 aa, Artificial Sequence
  Description of Artificial Sequence: Synthetic peptide
KEDDGKVSQNY

SEQ ID NO: 7800 - protein, 10 aa, Artificial Sequence
  Description of Artificial Sequence: Synthetic peptide
RETKIGKAGY

SEQ ID NO: 7801 - protein, 9 aa, Artificial Sequence
  Description of Artificial Sequence: Synthetic peptide
AETGQETAY

SEQ ID NO: 7802 - protein, 11 aa, Artificial Sequence
  Description of Artificial Sequence: Synthetic peptide
EEATPSPKQEL

SEQ ID NO: 7803 - protein, 10 aa, Artificial Sequence
  Description of Artificial Sequence: Synthetic peptide
AETGQETAYY

SEQ ID NO: 7804 - protein, 9 aa, Artificial Sequence
  Description of Artificial Sequence: Synthetic peptide
EEIWDNMTW

SEQ ID NO: 7805 - protein, 9 aa, Artificial Sequence
  Description of Artificial Sequence: Synthetic peptide
EEMEQEGKI

SEQ ID NO: 7806 - protein, 10 aa, Artificial Sequence
  Description of Artificial Sequence: Synthetic peptide
EEHEKYHSNW

SEQ ID NO: 7807 - protein, 9 aa, Artificial Sequence
  Description of Artificial Sequence: Synthetic peptide
EEMEKEGKI

SEQ ID NO: 7808 - protein, 9 aa, Artificial Sequence
  Description of Artificial Sequence: Synthetic peptide
DEDREVLKW

SEQ ID NO: 7809 - protein, 9 aa, Artificial Sequence
  Description of Artificial Sequence: Synthetic peptide
DEHREVLKW

SEQ ID NO: 7810 - protein, 10 aa, Artificial Sequence
  Description of Artificial Sequence: Synthetic peptide
QEDIWNNMTW

SEQ ID NO: 7811 - protein, 10 aa, Artificial Sequence
  Description of Artificial Sequence: Synthetic peptide
EEHEKYHNNW

SEQ ID NO: 7812 - protein, 11 aa, Artificial Sequence
  Description of Artificial Sequence: Synthetic peptide
NEKDLLALDSW

SEQ ID NO: 7813 - protein, 11 aa, Artificial Sequence
  Description of Artificial Sequence: Synthetic peptide
GEARLVITTYW

SEQ ID NO: 7814 - protein, 9 aa, Artificial Sequence
  Description of Artificial Sequence: Synthetic peptide
TERVGNPVF

SEQ ID NO: 7815 - protein, 9 aa, Artificial Sequence
  Description of Artificial Sequence: Synthetic peptide
AERQGSLNF

SEQ ID NO: 7816 - protein, 11 aa, Artificial Sequence
  Description of Artificial Sequence: Synthetic peptide
MEDEDREVLKW

SEQ ID NO: 7817 - protein, 10 aa, Artificial Sequence
  Description of Artificial Sequence: Synthetic peptide
AETGQETAYF

SEQ ID NO: 7818 - protein, 9 aa, Artificial Sequence
  Description of Artificial Sequence: Synthetic peptide
YEKEVHNVW

SEQ ID NO: 7819 - protein, 8 aa, Artificial Sequence
  Description of Artificial Sequence: Synthetic peptide
NETPGIRY

SEQ ID NO: 7820 - protein, 9 aa, Artificial Sequence
  Description of Artificial Sequence: Synthetic peptide
AERQGTFNF

SEQ ID NO: 7821 - protein, 9 aa, Artificial Sequence
  Description of Artificial Sequence: Synthetic peptide
YDTEVHNVW

SEQ ID NO: 7822 - protein, 10 aa, Artificial Sequence
  Description of Artificial Sequence: Synthetic peptide
QENDSNSSGY

SEQ ID NO: 7823 - protein, 11 aa, Artificial Sequence
  Description of Artificial Sequence: Synthetic peptide
GEARLVIITYW

SEQ ID NO: 7824 - protein, 11 aa, Artificial Sequence
  Description of Artificial Sequence: Synthetic peptide
AEHFPNKAIKF

SEQ ID NO: 7825 - protein, 9 aa, Artificial Sequence
  Description of Artificial Sequence: Synthetic peptide
REFPSEQTR

SEQ ID NO: 7826 - protein, 9 aa, Artificial Sequence
  Description of Artificial Sequence: Synthetic peptide
YDAEVHNVW

SEQ ID NO: 7827 - protein, 9 aa, Artificial Sequence
  Description of Artificial Sequence: Synthetic peptide
AEGETIIRF

SEQ ID NO: 7828 - protein, 11 aa, Artificial Sequence
  Description of Artificial Sequence: Synthetic peptide
AEIQKQGQNQW

SEQ ID NO: 7829 - protein, 9 aa, Artificial Sequence
  Description of Artificial Sequence: Synthetic peptide
TETNKTETF

SEQ ID NO: 7830 - protein, 11 aa, Artificial Sequence
  Description of Artificial Sequence: Synthetic peptide
AEIQKQGNDQW

SEQ ID NO: 7831 - protein, 11 aa, Artificial Sequence
  Description of Artificial Sequence: Synthetic peptide
AEIQKQGQDQW

SEQ ID NO: 7832 - protein, 11 aa, Artificial Sequence
  Description of Artificial Sequence: Synthetic peptide
EEATPSPKQEL

SEQ ID NO: 7833 - protein, 10 aa, Artificial Sequence
  Description of Artificial Sequence: Synthetic peptide
SETTNQKAEL

SEQ ID NO: 7834 - protein, 9 aa, Artificial Sequence
  Description of Artificial Sequence: Synthetic peptide
TEAVQKIAL

SEQ ID NO: 7835 - protein, 11 aa, Artificial Sequence
  Description of Artificial Sequence: Synthetic peptide
SEAGAERQGTF

SEQ ID NO: 7836 - protein, 11 aa, Artificial Sequence
  Description of Artificial Sequence: Synthetic peptide
AEQATQEVKNW

SEQ ID NO: 7837 - protein, 9 aa, Artificial Sequence
  Description of Artificial Sequence: Synthetic peptide
AELLGRSSL

SEQ ID NO: 7838 - protein, 11 aa, Artificial Sequence
  Description of Artificial Sequence: Synthetic peptide
AEQATQDVKNW

SEQ ID NO: 7839 - protein, 9 aa, Artificial Sequence
  Description of Artificial Sequence: Synthetic peptide
TERVGNPVF

SEQ ID NO: 7840 - protein, 11 aa, Artificial Sequence
  Description of Artificial Sequence: Synthetic peptide
SEVNIVTDSQY

SEQ ID NO: 7841 - protein, 10 aa, Artificial Sequence
  Description of Artificial Sequence: Synthetic peptide
AETGQETAYF

SEQ ID NO: 7842 - protein, 10 aa, Artificial Sequence
  Description of Artificial Sequence: Synthetic peptide
REINNYTNTI

SEQ ID NO: 7843 - protein, 9 aa, Artificial Sequence
  Description of Artificial Sequence: Synthetic peptide
EEINLPGKW

SEQ ID NO: 7844 - protein, 10 aa, Artificial Sequence
  Description of Artificial Sequence: Synthetic peptide
TETTNQKTEL

SEQ ID NO: 7845 - protein, 11 aa, Artificial Sequence
  Description of Artificial Sequence: Synthetic peptide
SEANIVTDSQY

SEQ ID NO: 7846 - protein, 9 aa, Artificial Sequence
  Description of Artificial Sequence: Synthetic peptide
SESEIVNQI

SEQ ID NO: 7847 - protein, 11 aa, Artificial Sequence
  Description of Artificial Sequence: Synthetic peptide
SEIVNQIIEQL

SEQ ID NO: 7848 - protein, 9 aa, Artificial Sequence
  Description of Artificial Sequence: Synthetic peptide
EEMEQEGKI

SEQ ID NO: 7849 - protein, 11 aa, Artificial Sequence
  Description of Artificial Sequence: Synthetic peptide
EEINEGENNCL

SEQ ID NO: 7850 - protein, 10 aa, Artificial Sequence
  Description of Artificial Sequence: Synthetic peptide
GEIIIRSENL

SEQ ID NO: 7851 - protein, 10 aa, Artificial Sequence
  Description of Artificial Sequence: Synthetic peptide
REISNYTNTI

SEQ ID NO: 7852 - protein, 9 aa, Artificial Sequence
  Description of Artificial Sequence: Synthetic peptide
AEHFPNKAI

SEQ ID NO: 7853 - protein, 10 aa, Artificial Sequence
  Description of Artificial Sequence: Synthetic peptide
KEPIAGVETF

SEQ ID NO: 7854 - protein, 9 aa, Artificial Sequence
  Description of Artificial Sequence: Synthetic peptide
EEVSLPGKW

SEQ ID NO: 7855 - protein, 11 aa, Artificial Sequence
  Description of Artificial Sequence: Synthetic peptide
AELELAENREI

SEQ ID NO: 7856 - protein, 9 aa, Artificial Sequence
  Description of Artificial Sequence: Synthetic peptide
AERQGSLNF

SEQ ID NO: 7857 - protein, 11 aa, Artificial Sequence
  Description of Artificial Sequence: Synthetic peptide
SETGAERQGTF

SEQ ID NO: 7858 - protein, 9 aa, Artificial Sequence
  Description of Artificial Sequence: Synthetic peptide
TEEEEGVGF

SEQ ID NO: 7859 - protein, 10 aa, Artificial Sequence
  Description of Artificial Sequence: Synthetic peptide
AEGTDRILEL

SEQ ID NO: 7860 - protein, 11 aa, Artificial Sequence
  Description of Artificial Sequence: Synthetic peptide
EETTPAPKQEL

SEQ ID NO: 7861 - protein, 8 aa, Artificial Sequence
  Description of Artificial Sequence: Synthetic peptide
AELQAIQL

SEQ ID NO: 7862 - protein, 10 aa, Artificial Sequence
  Description of Artificial Sequence: Synthetic peptide
KEPIAGAETF

SEQ ID NO: 7863 - protein, 10 aa, Artificial Sequence
  Description of Artificial Sequence: Synthetic peptide
KEPIAEAETF

SEQ ID NO: 7864 - protein, 9 aa, Artificial Sequence
  Description of Artificial Sequence: Synthetic peptide
ADEKVSQNF

SEQ ID NO: 7865 - protein, 10 aa, Artificial Sequence
  Description of Artificial Sequence: Synthetic peptide
AEHLKTAVQM

SEQ ID NO: 7866 - protein, 9 aa, Artificial Sequence
  Description of Artificial Sequence: Synthetic peptide
AEHFPNKTI

SEQ ID NO: 7867 - protein, 9 aa, Artificial Sequence
  Description of Artificial Sequence: Synthetic peptide
SESELVNQI

SEQ ID NO: 7868 - protein, 9 aa, Artificial Sequence
  Description of Artificial Sequence: Synthetic peptide
AESAIRKAI

SEQ ID NO: 7869 - protein, 10 aa, Artificial Sequence
  Description of Artificial Sequence: Synthetic peptide
AELQAIQLAL

SEQ ID NO: 7870 - protein, 9 aa, Artificial Sequence
  Description of Artificial Sequence: Synthetic peptide
AERQGTFNF

SEQ ID NO: 7871 - protein, 9 aa, Artificial Sequence
  Description of Artificial Sequence: Synthetic peptide
EEMEKEGKI

SEQ ID NO: 7872 - protein, 9 aa, Artificial Sequence
  Description of Artificial Sequence: Synthetic peptide
MEDEHREVL

SEQ ID NO: 7873 - protein, 9 aa, Artificial Sequence
  Description of Artificial Sequence: Synthetic peptide
EEIKLPGNW

SEQ ID NO: 7874 - protein, 9 aa, Artificial Sequence
  Description of Artificial Sequence: Synthetic peptide
SEDKWNETL

SEQ ID NO: 7875 - protein, 9 aa, Artificial Sequence
  Description of Artificial Sequence: Synthetic peptide
QEEEDEVGF

SEQ ID NO: 7876 - protein, 11 aa, Artificial Sequence
  Description of Artificial Sequence: Synthetic peptide
SEAGAERQGSL

SEQ ID NO: 7877 - protein, 9 aa, Artificial Sequence
  Description of Artificial Sequence: Synthetic peptide
QEEEEEVGF

SEQ ID NO: 7878 - protein, 9 aa, Artificial Sequence
  Description of Artificial Sequence: Synthetic peptide
SEGATPQDL

SEQ ID NO: 7879 - protein, 11 aa, Artificial Sequence
  Description of Artificial Sequence: Synthetic peptide
TEPTAPPEESF

SEQ ID NO: 7880 - protein, 11 aa, Artificial Sequence
  Description of Artificial Sequence: Synthetic peptide
SELVNQIIEQL

SEQ ID NO: 7881 - protein, 10 aa, Artificial Sequence
  Description of Artificial Sequence: Synthetic peptide
MEQEGKISRI

SEQ ID NO: 7882 - protein, 10 aa, Artificial Sequence
  Description of Artificial Sequence: Synthetic peptide
EELKSLFNTI

SEQ ID NO: 7883 - protein, 11 aa, Artificial Sequence
  Description of Artificial Sequence: Synthetic peptide
EEANTGENNSL

SEQ ID NO: 7884 - protein, 10 aa, Artificial Sequence
  Description of Artificial Sequence: Synthetic peptide
SESEIVNQII

SEQ ID NO: 7885 - protein, 9 aa, Artificial Sequence
  Description of Artificial Sequence: Synthetic peptide
QEKNEQDLL

SEQ ID NO: 7886 - protein, 9 aa, Artificial Sequence
  Description of Artificial Sequence: Synthetic peptide
GEQDKDRSI

SEQ ID NO: 7887 - protein, 9 aa, Artificial Sequence
  Description of Artificial Sequence: Synthetic peptide
MEDSHREVL

SEQ ID NO: 7888 - protein, 11 aa, Artificial Sequence
  Description of Artificial Sequence: Synthetic peptide
SENLTNNVKTI

SEQ ID NO: 7889 - protein, 10 aa, Artificial Sequence
  Description of Artificial Sequence: Synthetic peptide
IEIKDTKEAL

SEQ ID NO: 7890 - protein, 11 aa, Artificial Sequence
  Description of Artificial Sequence: Synthetic peptide
NETLQNVSKKL

SEQ ID NO: 7891 - protein, 10 aa, Artificial Sequence
  Description of Artificial Sequence: Synthetic peptide
KELQNQILKI

SEQ ID NO: 7892 - protein, 10 aa, Artificial Sequence
  Description of Artificial Sequence: Synthetic peptide
AEHFPNKTII

SEQ ID NO: 7893 - protein, 10 aa, Artificial Sequence
  Description of Artificial Sequence: Synthetic peptide
AETGQETAYY

SEQ ID NO: 7894 - protein, 11 aa, Artificial Sequence
  Description of Artificial Sequence: Synthetic peptide
AEHFPNKAIKF

SEQ ID NO: 7895 - protein, 9 aa, Artificial Sequence
  Description of Artificial Sequence: Synthetic peptide
VEQMHQDII

SEQ ID NO: 7896 - protein, 8 aa, Artificial Sequence
  Description of Artificial Sequence: Synthetic peptide
TELQAIQL

SEQ ID NO: 7897 - protein, 10 aa, Artificial Sequence
  Description of Artificial Sequence: Synthetic peptide
AESAIRKAIL

SEQ ID NO: 7898 - protein, 9 aa, Artificial Sequence
  Description of Artificial Sequence: Synthetic peptide
QEKNEKDLL

SEQ ID NO: 7899 - protein, 9 aa, Artificial Sequence
  Description of Artificial Sequence: Synthetic peptide
WENDMVEQM

SEQ ID NO: 7900 - protein, 9 aa, Artificial Sequence
  Description of Artificial Sequence: Synthetic peptide
GEQDRDRSI

SEQ ID NO: 7901 - protein, 8 aa, Artificial Sequence
  Description of Artificial Sequence: Synthetic peptide
SDIQTKEL

SEQ ID NO: 7902 - protein, 11 aa, Artificial Sequence
  Description of Artificial Sequence: Synthetic peptide
AEAMSQTNSAI

SEQ ID NO: 7903 - protein, 10 aa, Artificial Sequence
  Description of Artificial Sequence: Synthetic peptide
GDLEVTTHSF

SEQ ID NO: 7904 - protein, 9 aa, Artificial Sequence
  Description of Artificial Sequence: Synthetic peptide
QAKGLGISY

SEQ ID NO: 7905 - protein, 9 aa, Artificial Sequence
  Description of Artificial Sequence: Synthetic peptide
QTKGLGISY

SEQ ID NO: 7906 - protein, 10 aa, Artificial Sequence
  Description of Artificial Sequence: Synthetic peptide
ILKEPVHGVY

SEQ ID NO: 7907 - protein, 9 aa, Artificial Sequence
  Description of Artificial Sequence: Synthetic peptide
RAVGIGAVF

SEQ ID NO: 7908 - protein, 10 aa, Artificial Sequence
  Description of Artificial Sequence: Synthetic peptide
SIRIGPGQAF

SEQ ID NO: 7909 - protein, 9 aa, Artificial Sequence
  Description of Artificial Sequence: Synthetic peptide
KAKPPLPSV

SEQ ID NO: 7910 - protein, 9 aa, Artificial Sequence
  Description of Artificial Sequence: Synthetic peptide
FLGTAGSTM

SEQ ID NO: 7911 - protein, 10 aa, Artificial Sequence
  Description of Artificial Sequence: Synthetic peptide
SLFGSDPLST

SEQ ID NO: 7912 - protein, 9 aa, Artificial Sequence
  Description of Artificial Sequence: Synthetic peptide
KALTDIVTL

SEQ ID NO: 7913 - protein, 9 aa, Artificial Sequence
  Description of Artificial Sequence: Synthetic peptide
GKKAIGTVL

SEQ ID NO: 7914 - protein, 8 aa, Artificial Sequence
  Description of Artificial Sequence: Synthetic peptide
HQAAMQML

SEQ ID NO: 7915 - protein, 9 aa, Artificial Sequence
  Description of Artificial Sequence: Synthetic peptide
HQAISPRTL

SEQ ID NO: 7916 - protein, 9 aa, Artificial Sequence
  Description of Artificial Sequence: Synthetic peptide
IKPVVSTQL

SEQ ID NO: 7917 - protein, 10 aa, Artificial Sequence
  Description of Artificial Sequence: Synthetic peptide
HQNPISKQPL

SEQ ID NO: 7918 - protein, 9 aa, Artificial Sequence
  Description of Artificial Sequence: Synthetic peptide
RAIEAQQHL

SEQ ID NO: 7919 - protein, 9 aa, Artificial Sequence
  Description of Artificial Sequence: Synthetic peptide
TKPVVSTQL

SEQ ID NO: 7920 - protein, 8 aa, Artificial Sequence
  Description of Artificial Sequence: Synthetic peptide
AKIIIVQL

SEQ ID NO: 7921 - protein, 9 aa, Artificial Sequence
  Description of Artificial Sequence: Synthetic peptide
RALGPGASL

SEQ ID NO: 7922 - protein, 8 aa, Artificial Sequence
  Description of Artificial Sequence: Synthetic peptide
GQMVHQPL

SEQ ID NO: 7923 - protein, 8 aa, Artificial Sequence
  Description of Artificial Sequence: Synthetic peptide
KQLQARVL

SEQ ID NO: 7924 - protein, 9 aa, Artificial Sequence
  Description of Artificial Sequence: Synthetic peptide
RALGPGATL

SEQ ID NO: 7925 - protein, 9 aa, Artificial Sequence
  Description of Artificial Sequence: Synthetic peptide
RAVGLGAVL

SEQ ID NO: 7926 - protein, 8 aa, Artificial Sequence
  Description of Artificial Sequence: Synthetic peptide
KKAIGTVL

SEQ ID NO: 7927 - protein, 10 aa, Artificial Sequence
  Description of Artificial Sequence: Synthetic peptide
REINNYTNTI

SEQ ID NO: 7928 - protein, 9 aa, Artificial Sequence
  Description of Artificial Sequence: Synthetic peptide
AEHFPNKTI

SEQ ID NO: 7929 - protein, 9 aa, Artificial Sequence
  Description of Artificial Sequence: Synthetic peptide
SESEIVNQI

SEQ ID NO: 7930 - protein, 9 aa, Artificial Sequence
  Description of Artificial Sequence: Synthetic peptide
AEHFPNKAI

SEQ ID NO: 7931 - protein, 9 aa, Artificial Sequence
  Description of Artificial Sequence: Synthetic peptide
SESELVNQI

SEQ ID NO: 7932 - protein, 10 aa, Artificial Sequence
  Description of Artificial Sequence: Synthetic peptide
REISNYTNTI

SEQ ID NO: 7933 - protein, 9 aa, Artificial Sequence
  Description of Artificial Sequence: Synthetic peptide
SEFNLPPIV

SEQ ID NO: 7934 - protein, 9 aa, Artificial Sequence
  Description of Artificial Sequence: Synthetic peptide
GEENSWVTV

SEQ ID NO: 7935 - protein, 9 aa, Artificial Sequence
  Description of Artificial Sequence: Synthetic peptide
NEFNIPPVV

SEQ ID NO: 7936 - protein, 8 aa, Artificial Sequence
  Description of Artificial Sequence: Synthetic peptide
VEIKPLGV

SEQ ID NO: 7937 - protein, 8 aa, Artificial Sequence
  Description of Artificial Sequence: Synthetic peptide
VEVKPLGV

SEQ ID NO: 7938 - protein, 8 aa, Artificial Sequence
  Description of Artificial Sequence: Synthetic peptide
VEIKPLGI

SEQ ID NO: 7939 - protein, 9 aa, Artificial Sequence
  Description of Artificial Sequence: Synthetic peptide
LEKEPIAGV

SEQ ID NO: 7940 - protein, 10 aa, Artificial Sequence
  Description of Artificial Sequence: Synthetic peptide
AEHFPNKTII

SEQ ID NO: 7941 - protein, 9 aa, Artificial Sequence
  Description of Artificial Sequence: Synthetic peptide
REISNYTDI

SEQ ID NO: 7942 - protein, 10 aa, Artificial Sequence
  Description of Artificial Sequence: Synthetic peptide
EELKSLFNTV

SEQ ID NO: 7943 - protein, 9 aa, Artificial Sequence
  Description of Artificial Sequence: Synthetic peptide
REINNYTDI

SEQ ID NO: 7944 - protein, 8 aa, Artificial Sequence
  Description of Artificial Sequence: Synthetic peptide
TENSIITI

SEQ ID NO: 7945 - protein, 8 aa, Artificial Sequence
  Description of Artificial Sequence: Synthetic peptide
GEAIHGQV

SEQ ID NO: 7946 - protein, 10 aa, Artificial Sequence
  Description of Artificial Sequence: Synthetic peptide
EELKSLFNTI

SEQ ID NO: 7947 - protein, 10 aa, Artificial Sequence
  Description of Artificial Sequence: Synthetic peptide
GEIIGDIRQA

SEQ ID NO: 7948 - protein, 9 aa, Artificial Sequence
  Description of Artificial Sequence: Synthetic peptide
AESAIRKAI

SEQ ID NO: 7949 - protein, 8 aa, Artificial Sequence
  Description of Artificial Sequence: Synthetic peptide
QEIVMENV

SEQ ID NO: 7950 - protein, 8 aa, Artificial Sequence
  Description of Artificial Sequence: Synthetic peptide
SEIVNQII

SEQ ID NO: 7951 - protein, 8 aa, Artificial Sequence
  Description of Artificial Sequence: Synthetic peptide
IEEEQNKI

SEQ ID NO: 7952 - protein, 11 aa, Artificial Sequence
  Description of Artificial Sequence: Synthetic peptide
AELELAENREI

SEQ ID NO: 7953 - protein, 8 aa, Artificial Sequence
  Description of Artificial Sequence: Synthetic peptide
AEAETFYV

SEQ ID NO: 7954 - protein, 9 aa, Artificial Sequence
  Description of Artificial Sequence: Synthetic peptide
TEAVQKIAL

SEQ ID NO: 7955 - protein, 10 aa, Artificial Sequence
  Description of Artificial Sequence: Synthetic peptide
EELRSLFNTV

SEQ ID NO: 7956 - protein, 8 aa, Artificial Sequence
  Description of Artificial Sequence: Synthetic peptide
YEEIPIEI

SEQ ID NO: 7957 - protein, 8 aa, Artificial Sequence
  Description of Artificial Sequence: Synthetic peptide
DEALLQAV

SEQ ID NO: 7958 - protein, 9 aa, Artificial Sequence
  Description of Artificial Sequence: Synthetic peptide
EEMEQEGKI

SEQ ID NO: 7959 - protein, 8 aa, Artificial Sequence
  Description of Artificial Sequence: Synthetic peptide
YEKEVHNV

SEQ ID NO: 7960 - protein, 10 aa, Artificial Sequence
  Description of Artificial Sequence: Synthetic peptide
KELQKQITKV

SEQ ID NO: 7961 - protein, 8 aa, Artificial Sequence
  Description of Artificial Sequence: Synthetic peptide
SEFNLPPI

SEQ ID NO: 7962 - protein, 9 aa, Artificial Sequence
  Description of Artificial Sequence: Synthetic peptide
VEQMHQDII

SEQ ID NO: 7963 - protein, 8 aa, Artificial Sequence
  Description of Artificial Sequence: Synthetic peptide
IEELATMV

SEQ ID NO: 7964 - protein, 9 aa, Artificial Sequence
  Description of Artificial Sequence: Synthetic peptide
SERILSTCV

SEQ ID NO: 7965 - protein, 10 aa, Artificial Sequence
  Description of Artificial Sequence: Synthetic peptide
MEQEGKISRI

SEQ ID NO: 7966 - protein, 8 aa, Artificial Sequence
  Description of Artificial Sequence: Synthetic peptide
SENLTNNV

SEQ ID NO: 7967 - protein, 9 aa, Artificial Sequence
  Description of Artificial Sequence: Synthetic peptide
MEDDHNEVL

SEQ ID NO: 7968 - protein, 9 aa, Artificial Sequence
  Description of Artificial Sequence: Synthetic peptide
IEIKDTKEA

SEQ ID NO: 7969 - protein, 10 aa, Artificial Sequence
  Description of Artificial Sequence: Synthetic peptide
GEIIGDIRQA

SEQ ID NO: 7970 - protein, 9 aa, Artificial Sequence
  Description of Artificial Sequence: Synthetic peptide
LEKEPIAEA

SEQ ID NO: 7971 - protein, 9 aa, Artificial Sequence
  Description of Artificial Sequence: Synthetic peptide
REFPPETRA

SEQ ID NO: 7972 - protein, 9 aa, Artificial Sequence
  Description of Artificial Sequence: Synthetic peptide
VEIKPLGVA

SEQ ID NO: 7973 - protein, 9 aa, Artificial Sequence
  Description of Artificial Sequence: Synthetic peptide
LEKEPIAGA

SEQ ID NO: 7974 - protein, 10 aa, Artificial Sequence
  Description of Artificial Sequence: Synthetic peptide
REFPSEQTRA

SEQ ID NO: 7975 - protein, 9 aa, Artificial Sequence
  Description of Artificial Sequence: Synthetic peptide
VEVKPLGVA

SEQ ID NO: 7976 - protein, 9 aa, Artificial Sequence
  Description of Artificial Sequence: Synthetic peptide
IEVRDTKEA

SEQ ID NO: 7977 - protein, 9 aa, Artificial Sequence
  Description of Artificial Sequence: Synthetic peptide
LEIGQHRAP

SEQ ID NO: 7978 - protein, 10 aa, Artificial Sequence
  Description of Artificial Sequence: Synthetic peptide
SEFNLPPIVA

SEQ ID NO: 7979 - protein, 9 aa, Artificial Sequence
  Description of Artificial Sequence: Synthetic peptide
AETFYVDGA

SEQ ID NO: 7980 - protein, 10 aa, Artificial Sequence
  Description of Artificial Sequence: Synthetic peptide
REFSPEQTRA

SEQ ID NO: 7981 - protein, 10 aa, Artificial Sequence
  Description of Artificial Sequence: Synthetic peptide
SEVHIPLGEA

SEQ ID NO: 7982 - protein, 9 aa, Artificial Sequence
  Description of Artificial Sequence: Synthetic peptide
KTIEFQPPA

SEQ ID NO: 7983 - protein, 9 aa, Artificial Sequence
  Description of Artificial Sequence: Synthetic peptide
QEVGRAMYA

SEQ ID NO: 7984 - protein, 9 aa, Artificial Sequence
  Description of Artificial Sequence: Synthetic peptide
AVISIVNRV

SEQ ID NO: 7985 - protein, 9 aa, Artificial Sequence
  Description of Artificial Sequence: Synthetic peptide
VVAEGTDRL

SEQ ID NO: 7986 - protein, 9 aa, Artificial Sequence
  Description of Artificial Sequence: Synthetic peptide
ASITLTVQA

SEQ ID NO: 7987 - protein, 9 aa, Artificial Sequence
  Description of Artificial Sequence: Synthetic peptide
TETLLVQNA

SEQ ID NO: 7988 - protein, 9 aa, Artificial Sequence
  Description of Artificial Sequence: Synthetic peptide
AVFLGFLGA

SEQ ID NO: 7989 - protein, 10 aa, Artificial Sequence
  Description of Artificial Sequence: Synthetic peptide
AETFYVDGAA

SEQ ID NO: 7990 - protein, 10 aa, Artificial Sequence
  Description of Artificial Sequence: Synthetic peptide
AVNPGLLETA

SEQ ID NO: 7991 - protein, 9 aa, Artificial Sequence
  Description of Artificial Sequence: Synthetic peptide
EIIGDIRQA

SEQ ID NO: 7992 - protein, 10 aa, Artificial Sequence
  Description of Artificial Sequence: Synthetic peptide
AEAMSQTNSA

SEQ ID NO: 7993 - protein, 9 aa, Artificial Sequence
  Description of Artificial Sequence: Synthetic peptide
YEDFRKYTA

SEQ ID NO: 7994 - protein, 10 aa, Artificial Sequence
  Description of Artificial Sequence: Synthetic peptide
AERQGTFNFP

SEQ ID NO: 7995 - protein, 9 aa, Artificial Sequence
  Description of Artificial Sequence: Synthetic peptide
SEFNLPPIV

SEQ ID NO: 7996 - protein, 9 aa, Artificial Sequence
  Description of Artificial Sequence: Synthetic peptide
VEIKPLGIA

SEQ ID NO: 7997 - protein, 8 aa, Artificial Sequence
  Description of Artificial Sequence: Synthetic peptide
SEYILINC

SEQ ID NO: 7998 - protein, 10 aa, Artificial Sequence
  Description of Artificial Sequence: Synthetic peptide
AVFLGFLGAA

SEQ ID NO: 7999 - protein, 9 aa, Artificial Sequence
  Description of Artificial Sequence: Synthetic peptide
VETFYVDGA

SEQ ID NO: 8000 - protein, 10 aa, Artificial Sequence
  Description of Artificial Sequence: Synthetic peptide
VEVKPLGVAP

SEQ ID NO: 8001 - protein, 10 aa, Artificial Sequence
  Description of Artificial Sequence: Synthetic peptide
VEIKPLGVAP

SEQ ID NO: 8002 - protein, 9 aa, Artificial Sequence
  Description of Artificial Sequence: Synthetic peptide
ATLEEMMAA

SEQ ID NO: 8003 - protein, 10 aa, Artificial Sequence
  Description of Artificial Sequence: Synthetic peptide
REQAEHLKTA

SEQ ID NO: 8004 - protein, 9 aa, Artificial Sequence
  Description of Artificial Sequence: Synthetic peptide
EEVGFPVRP

SEQ ID NO: 8005 - protein, 9 aa, Artificial Sequence
  Description of Artificial Sequence: Synthetic peptide
ALFLGFLGA

SEQ ID NO: 8006 - protein, 9 aa, Artificial Sequence
  Description of Artificial Sequence: Synthetic peptide
AELQAIQLA

SEQ ID NO: 8007 - protein, 11 aa, Artificial Sequence
  Description of Artificial Sequence: Synthetic peptide
TQVEPGLADQL

SEQ ID NO: 8008 - protein, 9 aa, Artificial Sequence
  Description of Artificial Sequence: Synthetic peptide
LEKEPIAGV

SEQ ID NO: 8009 - protein, 8 aa, Artificial Sequence
  Description of Artificial Sequence: Synthetic peptide
TAFTIPSI

SEQ ID NO: 8010 - protein, 9 aa, Artificial Sequence
  Description of Artificial Sequence: Synthetic peptide
FPISPIETV

SEQ ID NO: 8011 - protein, 8 aa, Artificial Sequence
  Description of Artificial Sequence: Synthetic peptide
TALNFPQI

SEQ ID NO: 8012 - protein, 9 aa, Artificial Sequence
  Description of Artificial Sequence: Synthetic peptide
DAKAYDTEV

SEQ ID NO: 8013 - protein, 9 aa, Artificial Sequence
  Description of Artificial Sequence: Synthetic peptide
IPPVVPKEI

SEQ ID NO: 8014 - protein, 10 aa, Artificial Sequence
  Description of Artificial Sequence: Synthetic peptide
IPYNPQSQGV

SEQ ID NO: 8015 - protein, 8 aa, Artificial Sequence
  Description of Artificial Sequence: Synthetic peptide
VPVDPSEV

SEQ ID NO: 8016 - protein, 9 aa, Artificial Sequence
  Description of Artificial Sequence: Synthetic peptide
DANNNTITL

SEQ ID NO: 8017 - protein, 8 aa, Artificial Sequence
  Description of Artificial Sequence: Synthetic peptide
VPVDPREV

SEQ ID NO: 8018 - protein, 9 aa, Artificial Sequence
  Description of Artificial Sequence: Synthetic peptide
DPGLADHLI

SEQ ID NO: 8019 - protein, 9 aa, Artificial Sequence
  Description of Artificial Sequence: Synthetic peptide
LPPVVAKEI

SEQ ID NO: 8020 - protein, 9 aa, Artificial Sequence
  Description of Artificial Sequence: Synthetic peptide
SPLSFQTLI

SEQ ID NO: 8021 - protein, 9 aa, Artificial Sequence
  Description of Artificial Sequence: Synthetic peptide
LPPIVAKEI

SEQ ID NO: 8022 - protein, 8 aa, Artificial Sequence
  Description of Artificial Sequence: Synthetic peptide
DSWTVNDI

SEQ ID NO: 8023 - protein, 9 aa, Artificial Sequence
  Description of Artificial Sequence: Synthetic peptide
DAKAYDAEV

SEQ ID NO: 8024 - protein, 8 aa, Artificial Sequence
  Description of Artificial Sequence: Synthetic peptide
DAWEKIKL

SEQ ID NO: 8025 - protein, 9 aa, Artificial Sequence
  Description of Artificial Sequence: Synthetic peptide
DAKAYEKEV

SEQ ID NO: 8026 - protein, 8 aa, Artificial Sequence
  Description of Artificial Sequence: Synthetic peptide
TAYYILKL

SEQ ID NO: 8027 - protein, 8 aa, Artificial Sequence
  Description of Artificial Sequence: Synthetic peptide
NPYNTPVF

SEQ ID NO: 8028 - protein, 9 aa, Artificial Sequence
  Description of Artificial Sequence: Synthetic peptide
IPLGEARLI

SEQ ID NO: 8029 - protein, 10 aa, Artificial Sequence
  Description of Artificial Sequence: Synthetic peptide
IPLGEARLII

SEQ ID NO: 8030 - protein, 8 aa, Artificial Sequence
  Description of Artificial Sequence: Synthetic peptide
TAYFILKL

SEQ ID NO: 8031 - protein, 9 aa, Artificial Sequence
  Description of Artificial Sequence: Synthetic peptide
IPLGEARLV

SEQ ID NO: 8032 - protein, 9 aa, Artificial Sequence
  Description of Artificial Sequence: Synthetic peptide
EALLQAVRI

SEQ ID NO: 8033 - protein, 8 aa, Artificial Sequence
  Description of Artificial Sequence: Synthetic peptide
VAFIVALI

SEQ ID NO: 8034 - protein, 9 aa, Artificial Sequence
  Description of Artificial Sequence: Synthetic peptide
YAPPIAGNI

SEQ ID NO: 8035 - protein, 9 aa, Artificial Sequence
  Description of Artificial Sequence: Synthetic peptide
DAYFSVPLY

SEQ ID NO: 8036 - protein, 11 aa, Artificial Sequence
  Description of Artificial Sequence: Synthetic peptide
IPYNPQSQGVV

SEQ ID NO: 8037 - protein, 8 aa, Artificial Sequence
  Description of Artificial Sequence: Synthetic peptide
SPVSILDI

SEQ ID NO: 8038 - protein, 9 aa, Artificial Sequence
  Description of Artificial Sequence: Synthetic peptide
HPVHAGPVA

SEQ ID NO: 8039 - protein, 9 aa, Artificial Sequence
  Description of Artificial Sequence: Synthetic peptide
FPISPIETV

SEQ ID NO: 8040 - protein, 9 aa, Artificial Sequence
  Description of Artificial Sequence: Synthetic peptide
HPVPAGPIA

SEQ ID NO: 8041 - protein, 9 aa, Artificial Sequence
  Description of Artificial Sequence: Synthetic peptide
FPNKAIKFA

SEQ ID NO: 8042 - protein, 10 aa, Artificial Sequence
  Description of Artificial Sequence: Synthetic peptide
YPTPEGTRQA

SEQ ID NO: 8043 - protein, 9 aa, Artificial Sequence
  Description of Artificial Sequence: Synthetic peptide
HVASGYIEA

SEQ ID NO: 8044 - protein, 9 aa, Artificial Sequence
  Description of Artificial Sequence: Synthetic peptide
EAMSQTNSA

SEQ ID NO: 8045 - protein, 9 aa, Artificial Sequence
  Description of Artificial Sequence: Synthetic peptide
NPYNTPIFA

SEQ ID NO: 8046 - protein, 9 aa, Artificial Sequence
  Description of Artificial Sequence: Synthetic peptide
HPGSQPKTA

SEQ ID NO: 8047 - protein, 9 aa, Artificial Sequence
  Description of Artificial Sequence: Synthetic peptide
QMVHQPISA

SEQ ID NO: 8048 - protein, 10 aa, Artificial Sequence
  Description of Artificial Sequence: Synthetic peptide
YPKPEGTRQA

SEQ ID NO: 8049 - protein, 9 aa, Artificial Sequence
  Description of Artificial Sequence: Synthetic peptide
NPYNTPVFA

SEQ ID NO: 8050 - protein, 9 aa, Artificial Sequence
  Description of Artificial Sequence: Synthetic peptide
DASPTLFCA

SEQ ID NO: 8051 - protein, 9 aa, Artificial Sequence
  Description of Artificial Sequence: Synthetic peptide
HVASGYMEA

SEQ ID NO: 8052 - protein, 9 aa, Artificial Sequence
  Description of Artificial Sequence: Synthetic peptide
SPVSGKPCA

SEQ ID NO: 8053 - protein, 11 aa, Artificial Sequence
  Description of Artificial Sequence: Synthetic peptide
VPVDPREVEEA

SEQ ID NO: 8054 - protein, 8 aa, Artificial Sequence
  Description of Artificial Sequence: Synthetic peptide
TAFTIPSI

SEQ ID NO: 8055 - protein, 9 aa, Artificial Sequence
  Description of Artificial Sequence: Synthetic peptide
DPIPIHYCA

SEQ ID NO: 8056 - protein, 9 aa, Artificial Sequence
  Description of Artificial Sequence: Synthetic peptide
TSNLFNITA

SEQ ID NO: 8057 - protein, 11 aa, Artificial Sequence
  Description of Artificial Sequence: Synthetic peptide
FAVNPGLLETA

SEQ ID NO: 8058 - protein, 8 aa, Artificial Sequence
  Description of Artificial Sequence: Synthetic peptide
NPYPTPEG

SEQ ID NO: 8059 - protein, 8 aa, Artificial Sequence
  Description of Artificial Sequence: Synthetic peptide
FPNKTIEF

SEQ ID NO: 8060 - protein, 10 aa, Artificial Sequence
  Description of Artificial Sequence: Synthetic peptide
KPLGVAPTTA

SEQ ID NO: 8061 - protein, 11 aa, Artificial Sequence
  Description of Artificial Sequence: Synthetic peptide
LPPVVAKEIVA

SEQ ID NO: 8062 - protein, 8 aa, Artificial Sequence
  Description of Artificial Sequence: Synthetic peptide
TAFTIPST

SEQ ID NO: 8063 - protein, 11 aa, Artificial Sequence
  Description of Artificial Sequence: Synthetic peptide
FPISPIETVPV

SEQ ID NO: 8064 - protein, 8 aa, Artificial Sequence
  Description of Artificial Sequence: Synthetic peptide
FPSEQTRA

SEQ ID NO: 8065 - protein, 10 aa, Artificial Sequence
  Description of Artificial Sequence: Synthetic peptide
MPQILEPFRA

SEQ ID NO: 8066 - protein, 9 aa, Artificial Sequence
  Description of Artificial Sequence: Synthetic peptide
NPISGKPCA

SEQ ID NO: 8067 - protein, 11 aa, Artificial Sequence
  Description of Artificial Sequence: Synthetic peptide
MLNTVGGHQAA

SEQ ID NO: 8068 - protein, 9 aa, Artificial Sequence
  Description of Artificial Sequence: Synthetic peptide
EANTTLFCA

SEQ ID NO: 8069 - protein, 10 aa, Artificial Sequence
  Description of Artificial Sequence: Synthetic peptide
KPLGIAPTKA

SEQ ID NO: 8070 - protein, 8 aa, Artificial Sequence
  Description of Artificial Sequence: Synthetic peptide
MVHQPISA

SEQ ID NO: 8071 - protein, 9 aa, Artificial Sequence
  Description of Artificial Sequence: Synthetic peptide
FPIVQNLQG

SEQ ID NO: 8072 - protein, 10 aa, Artificial Sequence
  Description of Artificial Sequence: Synthetic peptide
HPVHAGPVAP

SEQ ID NO: 8073 - protein, 9 aa, Artificial Sequence
  Description of Artificial Sequence: Synthetic peptide
YPIVQNMQG

SEQ ID NO: 8074 - protein, 9 aa, Artificial Sequence
  Description of Artificial Sequence: Synthetic peptide
FPEGEAREF

SEQ ID NO: 8075 - protein, 9 aa, Artificial Sequence
  Description of Artificial Sequence: Synthetic peptide
KTIEFQPPA

SEQ ID NO: 8076 - protein, 9 aa, Artificial Sequence
  Description of Artificial Sequence: Synthetic peptide
HPVHAGPVA

SEQ ID NO: 8077 - protein, 9 aa, Artificial Sequence
  Description of Artificial Sequence: Synthetic peptide
HPVPAGPIA

SEQ ID NO: 8078 - protein, 9 aa, Artificial Sequence
  Description of Artificial Sequence: Synthetic peptide
IPKQPLPQT

SEQ ID NO: 8079 - protein, 10 aa, Artificial Sequence
  Description of Artificial Sequence: Synthetic peptide
YPKPEGTRQA

SEQ ID NO: 8080 - protein, 10 aa, Artificial Sequence
  Description of Artificial Sequence: Synthetic peptide
KPLGVAPTTA

SEQ ID NO: 8081 - protein, 9 aa, Artificial Sequence
  Description of Artificial Sequence: Synthetic peptide
FPISPIETV

SEQ ID NO: 8082 - protein, 9 aa, Artificial Sequence
  Description of Artificial Sequence: Synthetic peptide
KAKPPLPSV

SEQ ID NO: 8083 - protein, 9 aa, Artificial Sequence
  Description of Artificial Sequence: Synthetic peptide
RPEPTAPPA

SEQ ID NO: 8084 - protein, 10 aa, Artificial Sequence
  Description of Artificial Sequence: Synthetic peptide
YPTPEGTRQA

SEQ ID NO: 8085 - protein, 9 aa, Artificial Sequence
  Description of Artificial Sequence: Synthetic peptide
SPVSGKPCA

SEQ ID NO: 8086 - protein, 10 aa, Artificial Sequence
  Description of Artificial Sequence: Synthetic peptide
KPLGIAPTKA

SEQ ID NO: 8087 - protein, 9 aa, Artificial Sequence
  Description of Artificial Sequence: Synthetic peptide
NPISGKPCA

SEQ ID NO: 8088 - protein, 8 aa, Artificial Sequence
  Description of Artificial Sequence: Synthetic peptide
VPKEIVAC

SEQ ID NO: 8089 - protein, 9 aa, Artificial Sequence
  Description of Artificial Sequence: Synthetic peptide
HPVHAGPVA

SEQ ID NO: 8090 - protein, 10 aa, Artificial Sequence
  Description of Artificial Sequence: Synthetic peptide
KPLGVAPTTA

SEQ ID NO: 8091 - protein, 9 aa, Artificial Sequence
  Description of Artificial Sequence: Synthetic peptide
FPISPIETV

SEQ ID NO: 8092 - protein, 9 aa, Artificial Sequence
  Description of Artificial Sequence: Synthetic peptide
HPVPAGPIA

SEQ ID NO: 8093 - protein, 10 aa, Artificial Sequence
  Description of Artificial Sequence: Synthetic peptide
KPLGIAPTKA

SEQ ID NO: 8094 - protein, 9 aa, Artificial Sequence
  Description of Artificial Sequence: Synthetic peptide
APAAEGVGA

SEQ ID NO: 8095 - protein, 9 aa, Artificial Sequence
  Description of Artificial Sequence: Synthetic peptide
SPVSGKPCA

SEQ ID NO: 8096 - protein, 10 aa, Artificial Sequence
  Description of Artificial Sequence: Synthetic peptide
YPTPEGTRQA

SEQ ID NO: 8097 - protein, 10 aa, Artificial Sequence
  Description of Artificial Sequence: Synthetic peptide
IPAETGQETA

SEQ ID NO: 8098 - protein, 9 aa, Artificial Sequence
  Description of Artificial Sequence: Synthetic peptide
NPISGKPCA

SEQ ID NO: 8099 - protein, 10 aa, Artificial Sequence
  Description of Artificial Sequence: Synthetic peptide
APAAEGVGAA

SEQ ID NO: 8100 - protein, 9 aa, Artificial Sequence
  Description of Artificial Sequence: Synthetic peptide
NPYNTPVFA

SEQ ID NO: 8101 - protein, 9 aa, Artificial Sequence
  Description of Artificial Sequence: Synthetic peptide
QMVHQPISA

SEQ ID NO: 8102 - protein, 9 aa, Artificial Sequence
  Description of Artificial Sequence: Synthetic peptide
NPYNTPIFA

SEQ ID NO: 8103 - protein, 10 aa, Artificial Sequence
  Description of Artificial Sequence: Synthetic peptide
SPVSGKPCAV

SEQ ID NO: 8104 - protein, 9 aa, Artificial Sequence
  Description of Artificial Sequence: Synthetic peptide
RPEPTAPPA

SEQ ID NO: 8105 - protein, 9 aa, Artificial Sequence
  Description of Artificial Sequence: Synthetic peptide
KPLGVAPTT

SEQ ID NO: 8106 - protein, 9 aa, Artificial Sequence
  Description of Artificial Sequence: Synthetic peptide
HPGSQPKTA

SEQ ID NO: 8107 - protein, 10 aa, Artificial Sequence
  Description of Artificial Sequence: Synthetic peptide
YPKPEGTRQA

SEQ ID NO: 8108 - protein, 9 aa, Artificial Sequence
  Description of Artificial Sequence: Synthetic peptide
IPKQPLPQT

SEQ ID NO: 8109 - protein, 10 aa, Artificial Sequence
  Description of Artificial Sequence: Synthetic peptide
IPYNPQSQGV

SEQ ID NO: 8110 - protein, 9 aa, Artificial Sequence
  Description of Artificial Sequence: Synthetic peptide
HPVHAGPVA

SEQ ID NO: 8111 - protein, 10 aa, Artificial Sequence
  Description of Artificial Sequence: Synthetic peptide
KPLGVAPTTA

SEQ ID NO: 8112 - protein, 9 aa, Artificial Sequence
  Description of Artificial Sequence: Synthetic peptide
FPISPIETV

SEQ ID NO: 8113 - protein, 10 aa, Artificial Sequence
  Description of Artificial Sequence: Synthetic peptide
KPLGIAPTKA

SEQ ID NO: 8114 - protein, 9 aa, Artificial Sequence
  Description of Artificial Sequence: Synthetic peptide
QMVHQPISA

SEQ ID NO: 8115 - protein, 9 aa, Artificial Sequence
  Description of Artificial Sequence: Synthetic peptide
HPVPAGPIA

SEQ ID NO: 8116 - protein, 9 aa, Artificial Sequence
  Description of Artificial Sequence: Synthetic peptide
SPVSGKPCA

SEQ ID NO: 8117 - protein, 9 aa, Artificial Sequence
  Description of Artificial Sequence: Synthetic peptide
APAAEGVGA

SEQ ID NO: 8118 - protein, 10 aa, Artificial Sequence
  Description of Artificial Sequence: Synthetic peptide
IPYNPQSQGV

SEQ ID NO: 8119 - protein, 10 aa, Artificial Sequence
  Description of Artificial Sequence: Synthetic peptide
YPTPEGTRQA

SEQ ID NO: 8120 - protein, 10 aa, Artificial Sequence
  Description of Artificial Sequence: Synthetic peptide
APAAEGVGAA

SEQ ID NO: 8121 - protein, 10 aa, Artificial Sequence
  Description of Artificial Sequence: Synthetic peptide
SPVSGKPCAV

SEQ ID NO: 8122 - protein, 8 aa, Artificial Sequence
  Description of Artificial Sequence: Synthetic peptide
VPKEIVAC

SEQ ID NO: 8123 - protein, 9 aa, Artificial Sequence
  Description of Artificial Sequence: Synthetic peptide
IPKQPLPQT

SEQ ID NO: 8124 - protein, 9 aa, Artificial Sequence
  Description of Artificial Sequence: Synthetic peptide
SPTSRELQV

SEQ ID NO: 8125 - protein, 11 aa, Artificial Sequence
  Description of Artificial Sequence: Synthetic peptide
VPVDPREVEEA

SEQ ID NO: 8126 - protein, 10 aa, Artificial Sequence
  Description of Artificial Sequence: Synthetic peptide
IPAETGQETA

SEQ ID NO: 8127 - protein, 10 aa, Artificial Sequence
  Description of Artificial Sequence: Synthetic peptide
YPKPEGTRQA

SEQ ID NO: 8128 - protein, 9 aa, Artificial Sequence
  Description of Artificial Sequence: Synthetic peptide
RPEPTAPPA

SEQ ID NO: 8129 - protein, 10 aa, Artificial Sequence
  Description of Artificial Sequence: Synthetic peptide
NPNANITIPC

SEQ ID NO: 8130 - protein, 9 aa, Artificial Sequence
  Description of Artificial Sequence: Synthetic peptide
NPISGKPCA

SEQ ID NO: 8131 - protein, 10 aa, Artificial Sequence
  Description of Artificial Sequence: Synthetic peptide
SPISGKSCTV

SEQ ID NO: 8132 - protein, 9 aa, Artificial Sequence
  Description of Artificial Sequence: Synthetic peptide
HPGSQPKTA

SEQ ID NO: 8133 - protein, 10 aa, Artificial Sequence
  Description of Artificial Sequence: Synthetic peptide
APAGYAILKC

SEQ ID NO: 8134 - protein, 9 aa, Artificial Sequence
  Description of Artificial Sequence: Synthetic peptide
NPYNTPIFA

SEQ ID NO: 8135 - protein, 10 aa, Artificial Sequence
  Description of Artificial Sequence: Synthetic peptide
APPIEGKITC

SEQ ID NO: 8136 - protein, 9 aa, Artificial Sequence
  Description of Artificial Sequence: Synthetic peptide
NPYPKPEGT

SEQ ID NO: 8137 - protein, 11 aa, Artificial Sequence
  Description of Artificial Sequence: Synthetic peptide
KAYDAEVHNVW

SEQ ID NO: 8138 - protein, 11 aa, Artificial Sequence
  Description of Artificial Sequence: Synthetic peptide
KAYDTEVHNVW

SEQ ID NO: 8139 - protein, 10 aa, Artificial Sequence
  Description of Artificial Sequence: Synthetic peptide
SSLRGLQTGW

SEQ ID NO: 8140 - protein, 9 aa, Artificial Sequence
  Description of Artificial Sequence: Synthetic peptide
RVEGIQRNW

SEQ ID NO: 8141 - protein, 9 aa, Artificial Sequence
  Description of Artificial Sequence: Synthetic peptide
VSKLVEDKW

SEQ ID NO: 8142 - protein, 9 aa, Artificial Sequence
  Description of Artificial Sequence: Synthetic peptide
TAVPWNSSW

SEQ ID NO: 8143 - protein, 9 aa, Artificial Sequence
  Description of Artificial Sequence: Synthetic peptide
STLQEQITW

SEQ ID NO: 8144 - protein, 11 aa, Artificial Sequence
  Description of Artificial Sequence: Synthetic peptide
KSIRIGPGQTF

SEQ ID NO: 8145 - protein, 10 aa, Artificial Sequence
  Description of Artificial Sequence: Synthetic peptide
RSLRGLQRGW

SEQ ID NO: 8146 - protein, 10 aa, Artificial Sequence
  Description of Artificial Sequence: Synthetic peptide
SSLRGIQRGW

SEQ ID NO: 8147 - protein, 10 aa, Artificial Sequence
  Description of Artificial Sequence: Synthetic peptide
SSLKGLQRGW

SEQ ID NO: 8148 - protein, 9 aa, Artificial Sequence
  Description of Artificial Sequence: Synthetic peptide
TAVHWNSSW

SEQ ID NO: 8149 - protein, 11 aa, Artificial Sequence
  Description of Artificial Sequence: Synthetic peptide
KAYEKEVHNVW

SEQ ID NO: 8150 - protein, 9 aa, Artificial Sequence
  Description of Artificial Sequence: Synthetic peptide
KTQKVNALF

SEQ ID NO: 8151 - protein, 11 aa, Artificial Sequence
  Description of Artificial Sequence: Synthetic peptide
GTFNFPQITLW

SEQ ID NO: 8152 - protein, 11 aa, Artificial Sequence
  Description of Artificial Sequence: Synthetic peptide
KSIRIGPGQVF

SEQ ID NO: 8153 - protein, 10 aa, Artificial Sequence
  Description of Artificial Sequence: Synthetic peptide
LALDSWNNLW

SEQ ID NO: 8154 - protein, 9 aa, Artificial Sequence
  Description of Artificial Sequence: Synthetic peptide
KIKQIINMW

SEQ ID NO: 8155 - protein, 10 aa, Artificial Sequence
  Description of Artificial Sequence: Synthetic peptide
TTAVPWNSSW

SEQ ID NO: 8156 - protein, 9 aa, Artificial Sequence
  Description of Artificial Sequence: Synthetic peptide
RIKQIINMW

SEQ ID NO: 8157 - protein, 9 aa, Artificial Sequence
  Description of Artificial Sequence: Synthetic peptide
ISARTLNAW

SEQ ID NO: 8158 - protein, 11 aa, Artificial Sequence
  Description of Artificial Sequence: Synthetic peptide
LAFPEGEAREF

SEQ ID NO: 8159 - protein, 9 aa, Artificial Sequence
  Description of Artificial Sequence: Synthetic peptide
RSIRLVNGF

SEQ ID NO: 8160 - protein, 11 aa, Artificial Sequence
  Description of Artificial Sequence: Synthetic peptide
TTSTLQEQITW

SEQ ID NO: 8161 - protein, 9 aa, Artificial Sequence
  Description of Artificial Sequence: Synthetic peptide
VSKKLAEHF

SEQ ID NO: 8162 - protein, 9 aa, Artificial Sequence
  Description of Artificial Sequence: Synthetic peptide
KALTDIVTL

SEQ ID NO: 8163 - protein, 9 aa, Artificial Sequence
  Description of Artificial Sequence: Synthetic peptide
STLQEQIAW

SEQ ID NO: 8164 - protein, 9 aa, Artificial Sequence
  Description of Artificial Sequence: Synthetic peptide
RVRGILRNW

SEQ ID NO: 8165 - protein, 9 aa, Artificial Sequence
  Description of Artificial Sequence: Synthetic peptide
QTKGLGISY

SEQ ID NO: 8166 - protein, 10 aa, Artificial Sequence
  Description of Artificial Sequence: Synthetic peptide
KIATESIVIW

SEQ ID NO: 8167 - protein, 10 aa, Artificial Sequence
  Description of Artificial Sequence: Synthetic peptide
LALDSWKNLW

SEQ ID NO: 8168 - protein, 11 aa, Artificial Sequence
  Description of Artificial Sequence: Synthetic peptide
LAFPQGEAREF

SEQ ID NO: 8169 - protein, 9 aa, Artificial Sequence
  Description of Artificial Sequence: Synthetic peptide
KIKPPLPSI

SEQ ID NO: 8170 - protein, 10 aa, Artificial Sequence
  Description of Artificial Sequence: Synthetic peptide
VTVYYGVPVW

SEQ ID NO: 8171 - protein, 11 aa, Artificial Sequence
  Description of Artificial Sequence: Synthetic peptide
RSSLRGLQTGW

SEQ ID NO: 8172 - protein, 11 aa, Artificial Sequence
  Description of Artificial Sequence: Synthetic peptide
KAADEKVSQNF

SEQ ID NO: 8173 - protein, 9 aa, Artificial Sequence
  Description of Artificial Sequence: Synthetic peptide
LGHGVSIEW

SEQ ID NO: 8174 - protein, 11 aa, Artificial Sequence
  Description of Artificial Sequence: Synthetic peptide
KSIRIGPGQAF

SEQ ID NO: 8175 - protein, 9 aa, Artificial Sequence
  Description of Artificial Sequence: Synthetic peptide
STTKILEPF

SEQ ID NO: 8176 - protein, 9 aa, Artificial Sequence
  Description of Artificial Sequence: Synthetic peptide
ISERILSTF

SEQ ID NO: 8177 - protein, 11 aa, Artificial Sequence
  Description of Artificial Sequence: Synthetic peptide
KSLFNTIAVLY

SEQ ID NO: 8178 - protein, 10 aa, Artificial Sequence
  Description of Artificial Sequence: Synthetic peptide
TTAVHWNSSW

SEQ ID NO: 8179 - protein, 10 aa, Artificial Sequence
  Description of Artificial Sequence: Synthetic peptide
KTQKVNALFY

SEQ ID NO: 8180 - protein, 10 aa, Artificial Sequence
  Description of Artificial Sequence: Synthetic peptide
KYLGGLVQYW

SEQ ID NO: 8181 - protein, 9 aa, Artificial Sequence
  Description of Artificial Sequence: Synthetic peptide
QANFLGRLW

SEQ ID NO: 8182 - protein, 11 aa, Artificial Sequence
  Description of Artificial Sequence: Synthetic peptide
KSLFNTVATLY

SEQ ID NO: 8183 - protein, 9 aa, Artificial Sequence
  Description of Artificial Sequence: Synthetic peptide
RSIRLVSGF

SEQ ID NO: 8184 - protein, 9 aa, Artificial Sequence
  Description of Artificial Sequence: Synthetic peptide
QATQDVKNW

SEQ ID NO: 8185 - protein, 9 aa, Artificial Sequence
  Description of Artificial Sequence: Synthetic peptide
KTAVQMAVF

SEQ ID NO: 8186 - protein, 9 aa, Artificial Sequence
  Description of Artificial Sequence: Synthetic peptide
SLRGLQTGW

SEQ ID NO: 8187 - protein, 9 aa, Artificial Sequence
  Description of Artificial Sequence: Synthetic peptide
WSKSSIVGW

SEQ ID NO: 8188 - protein, 9 aa, Artificial Sequence
  Description of Artificial Sequence: Synthetic peptide
KSVAIVCTR

SEQ ID NO: 8189 - protein, 11 aa, Artificial Sequence
  Description of Artificial Sequence: Synthetic peptide
KAADEKVSQNF

SEQ ID NO: 8190 - protein, 10 aa, Artificial Sequence
  Description of Artificial Sequence: Synthetic peptide
SSLRGLQTGW

SEQ ID NO: 8191 - protein, 9 aa, Artificial Sequence
  Description of Artificial Sequence: Synthetic peptide
STLQEQITW

SEQ ID NO: 8192 - protein, 11 aa, Artificial Sequence
  Description of Artificial Sequence: Synthetic peptide
KSIRIGPGQTF

SEQ ID NO: 8193 - protein, 9 aa, Artificial Sequence
  Description of Artificial Sequence: Synthetic peptide
KALTDIVTL

SEQ ID NO: 8194 - protein, 9 aa, Artificial Sequence
  Description of Artificial Sequence: Synthetic peptide
KTQKVNALF

SEQ ID NO: 8195 - protein, 9 aa, Artificial Sequence
  Description of Artificial Sequence: Synthetic peptide
KAIEAQQHM

SEQ ID NO: 8196 - protein, 9 aa, Artificial Sequence
  Description of Artificial Sequence: Synthetic peptide
RAVGIGAVF

SEQ ID NO: 8197 - protein, 11 aa, Artificial Sequence
  Description of Artificial Sequence: Synthetic peptide
KAYDAEVHNVW

SEQ ID NO: 8198 - protein, 11 aa, Artificial Sequence
  Description of Artificial Sequence: Synthetic peptide
KAYDTEVHNVW

SEQ ID NO: 8199 - protein, 9 aa, Artificial Sequence
  Description of Artificial Sequence: Synthetic peptide
TAVPWNSSW

SEQ ID NO: 8200 - protein, 9 aa, Artificial Sequence
  Description of Artificial Sequence: Synthetic peptide
ISERILSTF

SEQ ID NO: 8201 - protein, 9 aa, Artificial Sequence
  Description of Artificial Sequence: Synthetic peptide
RAIEAQQHL

SEQ ID NO: 8202 - protein, 9 aa, Artificial Sequence
  Description of Artificial Sequence: Synthetic peptide
RAIEAQQHM

SEQ ID NO: 8203 - protein, 9 aa, Artificial Sequence
  Description of Artificial Sequence: Synthetic peptide
ISARTLNAW

SEQ ID NO: 8204 - protein, 9 aa, Artificial Sequence
  Description of Artificial Sequence: Synthetic peptide
STLQEQIAW

SEQ ID NO: 8205 - protein, 9 aa, Artificial Sequence
  Description of Artificial Sequence: Synthetic peptide
YSTRVDPGL

SEQ ID NO: 8206 - protein, 9 aa, Artificial Sequence
  Description of Artificial Sequence: Synthetic peptide
YSTQVEPGL

SEQ ID NO: 8207 - protein, 10 aa, Artificial Sequence
  Description of Artificial Sequence: Synthetic peptide
TSNLQEQVAW

SEQ ID NO: 8208 - protein, 9 aa, Artificial Sequence
  Description of Artificial Sequence: Synthetic peptide
YSTQVDPGL

SEQ ID NO: 8209 - protein, 11 aa, Artificial Sequence
  Description of Artificial Sequence: Synthetic peptide
KSIRIGPGQAF

SEQ ID NO: 8210 - protein, 10 aa, Artificial Sequence
  Description of Artificial Sequence: Synthetic peptide
KAIEAQQHML

SEQ ID NO: 8211 - protein, 11 aa, Artificial Sequence
  Description of Artificial Sequence: Synthetic peptide
KSIRIGPGQVF

SEQ ID NO: 8212 - protein, 9 aa, Artificial Sequence
  Description of Artificial Sequence: Synthetic peptide
KTAVQMAVF

SEQ ID NO: 8213 - protein, 10 aa, Artificial Sequence
  Description of Artificial Sequence: Synthetic peptide
RAIEAQQHLL

SEQ ID NO: 8214 - protein, 9 aa, Artificial Sequence
  Description of Artificial Sequence: Synthetic peptide
QATQDVKNW

SEQ ID NO: 8215 - protein, 9 aa, Artificial Sequence
  Description of Artificial Sequence: Synthetic peptide
IQKQGQNQW

SEQ ID NO: 8216 - protein, 9 aa, Artificial Sequence
  Description of Artificial Sequence: Synthetic peptide
TSSLFNSTY

SEQ ID NO: 8217 - protein, 9 aa, Artificial Sequence
  Description of Artificial Sequence: Synthetic peptide
TINEEAAEW

SEQ ID NO: 8218 - protein, 9 aa, Artificial Sequence
  Description of Artificial Sequence: Synthetic peptide
ASITLTVQV

SEQ ID NO: 8219 - protein, 8 aa, Artificial Sequence
  Description of Artificial Sequence: Synthetic peptide
NSPTSREL

SEQ ID NO: 8220 - protein, 9 aa, Artificial Sequence
  Description of Artificial Sequence: Synthetic peptide
YSPLSFQTL

SEQ ID NO: 8221 - protein, 9 aa, Artificial Sequence
  Description of Artificial Sequence: Synthetic peptide
TTPAPKQEL

SEQ ID NO: 8222 - protein, 8 aa, Artificial Sequence
  Description of Artificial Sequence: Synthetic peptide
NSPTRREL

SEQ ID NO: 8223 - protein, 9 aa, Artificial Sequence
  Description of Artificial Sequence: Synthetic peptide
ATPSPKQEL

SEQ ID NO: 8224 - protein, 9 aa, Artificial Sequence
  Description of Artificial Sequence: Synthetic peptide
YSPVSILDI

SEQ ID NO: 8225 - protein, 9 aa, Artificial Sequence
  Description of Artificial Sequence: Synthetic peptide
QAKGLGISY

SEQ ID NO: 8226 - protein, 9 aa, Artificial Sequence
  Description of Artificial Sequence: Synthetic peptide
RAVGIGAVF

SEQ ID NO: 8227 - protein, 10 aa, Artificial Sequence
  Description of Artificial Sequence: Synthetic peptide
FQKKGLGISY

SEQ ID NO: 8228 - protein, 9 aa, Artificial Sequence
  Description of Artificial Sequence: Synthetic peptide
QAKGLGISY

SEQ ID NO: 8229 - protein, 9 aa, Artificial Sequence
  Description of Artificial Sequence: Synthetic peptide
EARLVITTY

SEQ ID NO: 8230 - protein, 9 aa, Artificial Sequence
  Description of Artificial Sequence: Synthetic peptide
QTKGLGISY

SEQ ID NO: 8231 - protein, 9 aa, Artificial Sequence
  Description of Artificial Sequence: Synthetic peptide
SLDPIPIHY

SEQ ID NO: 8232 - protein, 9 aa, Artificial Sequence
  Description of Artificial Sequence: Synthetic peptide
MVHQPISAR

SEQ ID NO: 8233 - protein, 8 aa, Artificial Sequence
  Description of Artificial Sequence: Synthetic peptide
VLDVGDAY

SEQ ID NO: 8234 - protein, 9 aa, Artificial Sequence
  Description of Artificial Sequence: Synthetic peptide
RALGPGASL

SEQ ID NO: 8235 - protein, 9 aa, Artificial Sequence
  Description of Artificial Sequence: Synthetic peptide
RAIEAQQHL

SEQ ID NO: 8236 - protein, 9 aa, Artificial Sequence
  Description of Artificial Sequence: Synthetic peptide
RALGPGATL

SEQ ID NO: 8237 - protein, 9 aa, Artificial Sequence
  Description of Artificial Sequence: Synthetic peptide
LAWDDLRSL

SEQ ID NO: 8238 - protein, 9 aa, Artificial Sequence
  Description of Artificial Sequence: Synthetic peptide
VAEGTDRIL

SEQ ID NO: 8239 - protein, 9 aa, Artificial Sequence
  Description of Artificial Sequence: Synthetic peptide
TAVVQKIAL

SEQ ID NO: 8240 - protein, 9 aa, Artificial Sequence
  Description of Artificial Sequence: Synthetic peptide
VAEGTDRIL

SEQ ID NO: 8241 - protein, 9 aa, Artificial Sequence
  Description of Artificial Sequence: Synthetic peptide
RALGPGASL

SEQ ID NO: 8242 - protein, 9 aa, Artificial Sequence
  Description of Artificial Sequence: Synthetic peptide
RAIEAQQHL

SEQ ID NO: 8243 - protein, 8 aa, Artificial Sequence
  Description of Artificial Sequence: Synthetic peptide
LTQLGRTL

SEQ ID NO: 8244 - protein, 9 aa, Artificial Sequence
  Description of Artificial Sequence: Synthetic peptide
TAVVQKIAL

SEQ ID NO: 8245 - protein, 8 aa, Artificial Sequence
  Description of Artificial Sequence: Synthetic peptide
IAARAVEL

SEQ ID NO: 8246 - protein, 9 aa, Artificial Sequence
  Description of Artificial Sequence: Synthetic peptide
RALGPGATL

SEQ ID NO: 8247 - protein, 9 aa, Artificial Sequence
  Description of Artificial Sequence: Synthetic peptide
ATDIQTKEL

SEQ ID NO: 8248 - protein, 9 aa, Artificial Sequence
  Description of Artificial Sequence: Synthetic peptide
YVDRFFKTL

SEQ ID NO: 8249 - protein, 9 aa, Artificial Sequence
  Description of Artificial Sequence: Synthetic peptide
LAWDDLRSL

SEQ ID NO: 8250 - protein, 9 aa, Artificial Sequence
  Description of Artificial Sequence: Synthetic peptide
YSTQVDPGL

SEQ ID NO: 8251 - protein, 9 aa, Artificial Sequence
  Description of Artificial Sequence: Synthetic peptide
TFDPIPIHY

SEQ ID NO: 8252 - protein, 9 aa, Artificial Sequence
  Description of Artificial Sequence: Synthetic peptide
QYDQIIIEI

SEQ ID NO: 8253 - protein, 9 aa, Artificial Sequence
  Description of Artificial Sequence: Synthetic peptide
LFDTTAIVV

SEQ ID NO: 8254 - protein, 9 aa, Artificial Sequence
  Description of Artificial Sequence: Synthetic peptide
FYDPSKDLI

SEQ ID NO: 8255 - protein, 9 aa, Artificial Sequence
  Description of Artificial Sequence: Synthetic peptide
QYDQILIEI

SEQ ID NO: 8256 - protein, 9 aa, Artificial Sequence
  Description of Artificial Sequence: Synthetic peptide
FPEGEAREF

SEQ ID NO: 8257 - protein, 9 aa, Artificial Sequence
  Description of Artificial Sequence: Synthetic peptide
SFDPIPIHY

SEQ ID NO: 8258 - protein, 8 aa, Artificial Sequence
  Description of Artificial Sequence: Synthetic peptide
HTDNGSNF

SEQ ID NO: 8259 - protein, 9 aa, Artificial Sequence
  Description of Artificial Sequence: Synthetic peptide
IIDIIATDL

SEQ ID NO: 8260 - protein, 9 aa, Artificial Sequence
  Description of Artificial Sequence: Synthetic peptide
KAELQAIQL

SEQ ID NO: 8261 - protein, 9 aa, Artificial Sequence
  Description of Artificial Sequence: Synthetic peptide
VLDVGDAYF

SEQ ID NO: 8262 - protein, 9 aa, Artificial Sequence
  Description of Artificial Sequence: Synthetic peptide
IQDNSDIKV

SEQ ID NO: 8263 - protein, 9 aa, Artificial Sequence
  Description of Artificial Sequence: Synthetic peptide
QRPLVTIKI

SEQ ID NO: 8264 - protein, 9 aa, Artificial Sequence
  Description of Artificial Sequence: Synthetic peptide
KRKAYALFY

SEQ ID NO: 8265 - protein, 9 aa, Artificial Sequence
  Description of Artificial Sequence: Synthetic peptide
SAISLFDTI

SEQ ID NO: 8266 - protein, 9 aa, Artificial Sequence
  Description of Artificial Sequence: Synthetic peptide
EARLVITTY

SEQ ID NO: 8267 - protein, 9 aa, Artificial Sequence
  Description of Artificial Sequence: Synthetic peptide
KALTDIVTL

SEQ ID NO: 8268 - protein, 9 aa, Artificial Sequence
  Description of Artificial Sequence: Synthetic peptide
VAEGTDRIL

SEQ ID NO: 8269 - protein, 9 aa, Artificial Sequence
  Description of Artificial Sequence: Synthetic peptide
QAKGLGISY

SEQ ID NO: 8270 - protein, 9 aa, Artificial Sequence
  Description of Artificial Sequence: Synthetic peptide
FLGAAGSTM

SEQ ID NO: 8271 - protein, 9 aa, Artificial Sequence
  Description of Artificial Sequence: Synthetic peptide
TAVVQKIAL

SEQ ID NO: 8272 - protein, 9 aa, Artificial Sequence
  Description of Artificial Sequence: Synthetic peptide
TVLDVGDAY

SEQ ID NO: 8273 - protein, 9 aa, Artificial Sequence
  Description of Artificial Sequence: Synthetic peptide
IVTDSQYAL

SEQ ID NO: 8274 - protein, 9 aa, Artificial Sequence
  Description of Artificial Sequence: Synthetic peptide
SQVNNTTIM

SEQ ID NO: 8275 - protein, 9 aa, Artificial Sequence
  Description of Artificial Sequence: Synthetic peptide
ASDIQTKEL

SEQ ID NO: 8276 - protein, 10 aa, Artificial Sequence
  Description of Artificial Sequence: Synthetic peptide
AGDDRQGTAL

SEQ ID NO: 8277 - protein, 9 aa, Artificial Sequence
  Description of Artificial Sequence: Synthetic peptide
ATDLQTKEL

SEQ ID NO: 8278 - protein, 10 aa, Artificial Sequence
  Description of Artificial Sequence: Synthetic peptide
YVDGAANREI

SEQ ID NO: 8279 - protein, 9 aa, Artificial Sequence
  Description of Artificial Sequence: Synthetic peptide
IIDIIATDL

SEQ ID NO: 8280 - protein, 9 aa, Artificial Sequence
  Description of Artificial Sequence: Synthetic peptide
ATDIQTKEL

SEQ ID NO: 8281 - protein, 9 aa, Artificial Sequence
  Description of Artificial Sequence: Synthetic peptide
ASDANNNTI

SEQ ID NO: 8282 - protein, 11 aa, Artificial Sequence
  Description of Artificial Sequence: Synthetic peptide
TIDKELPLTSL

SEQ ID NO: 8283 - protein, 10 aa, Artificial Sequence
  Description of Artificial Sequence: Synthetic peptide
SQDLDKHGAL

SEQ ID NO: 8284 - protein, 9 aa, Artificial Sequence
  Description of Artificial Sequence: Synthetic peptide
HTDNGSNFI

SEQ ID NO: 8285 - protein, 10 aa, Artificial Sequence
  Description of Artificial Sequence: Synthetic peptide
AADEKVSQNF

SEQ ID NO: 8286 - protein, 9 aa, Artificial Sequence
  Description of Artificial Sequence: Synthetic peptide
TQDFWEVQL

SEQ ID NO: 8287 - protein, 8 aa, Artificial Sequence
  Description of Artificial Sequence: Synthetic peptide
DLDKHGAL

SEQ ID NO: 8288 - protein, 9 aa, Artificial Sequence
  Description of Artificial Sequence: Synthetic peptide
KAELQAIQL

SEQ ID NO: 8289 - protein, 10 aa, Artificial Sequence
  Description of Artificial Sequence: Synthetic peptide
SLFGSDPLST

SEQ ID NO: 8290 - protein, 9 aa, Artificial Sequence
  Description of Artificial Sequence: Synthetic peptide
RALGPGATL

SEQ ID NO: 8291 - protein, 10 aa, Artificial Sequence
  Description of Artificial Sequence: Synthetic peptide
SLFGSDPLSQ

SEQ ID NO: 8292 - protein, 9 aa, Artificial Sequence
  Description of Artificial Sequence: Synthetic peptide
RALGPGASL

SEQ ID NO: 8293 - protein, 9 aa, Artificial Sequence
  Description of Artificial Sequence: Synthetic peptide
RAVGLGAVL

SEQ ID NO: 8294 - protein, 9 aa, Artificial Sequence
  Description of Artificial Sequence: Synthetic peptide
KALTDIVTL

SEQ ID NO: 8295 - protein, 10 aa, Artificial Sequence
  Description of Artificial Sequence: Synthetic peptide
TDNGSNFTSN

SEQ ID NO: 8296 - protein, 10 aa, Artificial Sequence
  Description of Artificial Sequence: Synthetic peptide
VSFDPIPIHY

SEQ ID NO: 8297 - protein, 10 aa, Artificial Sequence
  Description of Artificial Sequence: Synthetic peptide
VTFDPIPIHY

SEQ ID NO: 8298 - protein, 9 aa, Artificial Sequence
  Description of Artificial Sequence: Synthetic peptide
NAKTIIVHL

SEQ ID NO: 8299 - protein, 9 aa, Artificial Sequence
  Description of Artificial Sequence: Synthetic peptide
QAKGLGISY

SEQ ID NO: 8300 - protein, 9 aa, Artificial Sequence
  Description of Artificial Sequence: Synthetic peptide
KAKPPLPSV

SEQ ID NO: 8301 - protein, 9 aa, Artificial Sequence
  Description of Artificial Sequence: Synthetic peptide
GAASITLTV

SEQ ID NO: 8302 - protein, 9 aa, Artificial Sequence
  Description of Artificial Sequence: Synthetic peptide
ASITLTVQV

SEQ ID NO: 8303 - protein, 9 aa, Artificial Sequence
  Description of Artificial Sequence: Synthetic peptide
HFPNKTIEF

SEQ ID NO: 8304 - protein, 9 aa, Artificial Sequence
  Description of Artificial Sequence: Synthetic peptide
HFQNKTIEF

SEQ ID NO: 8305 - protein, 10 aa, Artificial Sequence
  Description of Artificial Sequence: Synthetic peptide
AFPEGEAREF

SEQ ID NO: 8306 - protein, 9 aa, Artificial Sequence
  Description of Artificial Sequence: Synthetic peptide
FYQEPFKNL

SEQ ID NO: 8307 - protein, 9 aa, Artificial Sequence
  Description of Artificial Sequence: Synthetic peptide
HFPNKAIKF

SEQ ID NO: 8308 - protein, 8 aa, Artificial Sequence
  Description of Artificial Sequence: Synthetic peptide
SFNITTEL

SEQ ID NO: 8309 - protein, 10 aa, Artificial Sequence
  Description of Artificial Sequence: Synthetic peptide
AFPQGEAREF

SEQ ID NO: 8310 - protein, 9 aa, Artificial Sequence
  Description of Artificial Sequence: Synthetic peptide
HFPNKTIIF

SEQ ID NO: 8311 - protein, 9 aa, Artificial Sequence
  Description of Artificial Sequence: Synthetic peptide
IYQEPFKNL

SEQ ID NO: 8312 - protein, 8 aa, Artificial Sequence
  Description of Artificial Sequence: Synthetic peptide
SFNATTEL

SEQ ID NO: 8313 - protein, 9 aa, Artificial Sequence
  Description of Artificial Sequence: Synthetic peptide
SFLYASVDY

SEQ ID NO: 8314 - protein, 10 aa, Artificial Sequence
  Description of Artificial Sequence: Synthetic peptide
GFLGTAGSTM

SEQ ID NO: 8315 - protein, 9 aa, Artificial Sequence
  Description of Artificial Sequence: Synthetic peptide
LFNSTKLEL

SEQ ID NO: 8316 - protein, 9 aa, Artificial Sequence
  Description of Artificial Sequence: Synthetic peptide
AYIEYRKLL

SEQ ID NO: 8317 - protein, 10 aa, Artificial Sequence
  Description of Artificial Sequence: Synthetic peptide
AFQQGKAREF

SEQ ID NO: 8318 - protein, 9 aa, Artificial Sequence
  Description of Artificial Sequence: Synthetic peptide
TYQIYQEPF

SEQ ID NO: 8319 - protein, 8 aa, Artificial Sequence
  Description of Artificial Sequence: Synthetic peptide
VYNTQGYF

SEQ ID NO: 8320 - protein, 10 aa, Artificial Sequence
  Description of Artificial Sequence: Synthetic peptide
GFLGAAGSTM

SEQ ID NO: 8321 - protein, 9 aa, Artificial Sequence
  Description of Artificial Sequence: Synthetic peptide
KYLGSLVQY

SEQ ID NO: 8322 - protein, 8 aa, Artificial Sequence
  Description of Artificial Sequence: Synthetic peptide
VYHTQGYF

SEQ ID NO: 8323 - protein, 11 aa, Artificial Sequence
  Description of Artificial Sequence: Synthetic peptide
FYVDGAANREI

SEQ ID NO: 8324 - protein, 9 aa, Artificial Sequence
  Description of Artificial Sequence: Synthetic peptide
FFYCNTSSL

SEQ ID NO: 8325 - protein, 9 aa, Artificial Sequence
  Description of Artificial Sequence: Synthetic peptide
LFNTVATLY

SEQ ID NO: 8326 - protein, 9 aa, Artificial Sequence
  Description of Artificial Sequence: Synthetic peptide
IFRPGGGNM

SEQ ID NO: 8327 - protein, 9 aa, Artificial Sequence
  Description of Artificial Sequence: Synthetic peptide
IFWDDLRSL

SEQ ID NO: 8328 - protein, 9 aa, Artificial Sequence
  Description of Artificial Sequence: Synthetic peptide
KYHSNWRAM

SEQ ID NO: 8329 - protein, 8 aa, Artificial Sequence
  Description of Artificial Sequence: Synthetic peptide
NYPIVQNL

SEQ ID NO: 8330 - protein, 8 aa, Artificial Sequence
  Description of Artificial Sequence: Synthetic peptide
SFNITTEL

SEQ ID NO: 8331 - protein, 9 aa, Artificial Sequence
  Description of Artificial Sequence: Synthetic peptide
HFQNKTIEF

SEQ ID NO: 8332 - protein, 10 aa, Artificial Sequence
  Description of Artificial Sequence: Synthetic peptide
AFPEGEAREF

SEQ ID NO: 8333 - protein, 9 aa, Artificial Sequence
  Description of Artificial Sequence: Synthetic peptide
IYQEPFKNL

SEQ ID NO: 8334 - protein, 10 aa, Artificial Sequence
  Description of Artificial Sequence: Synthetic peptide
GFLGTAGSTM

SEQ ID NO: 8335 - protein, 10 aa, Artificial Sequence
  Description of Artificial Sequence: Synthetic peptide
GFLGAAGSTM

SEQ ID NO: 8336 - protein, 9 aa, Artificial Sequence
  Description of Artificial Sequence: Synthetic peptide
FYQEPFKNL

SEQ ID NO: 8337 - protein, 9 aa, Artificial Sequence
  Description of Artificial Sequence: Synthetic peptide
HFPNKTIEF

SEQ ID NO: 8338 - protein, 10 aa, Artificial Sequence
  Description of Artificial Sequence: Synthetic peptide
AFPQGEAREF

SEQ ID NO: 8339 - protein, 9 aa, Artificial Sequence
  Description of Artificial Sequence: Synthetic peptide
KYLGSLVQY

SEQ ID NO: 8340 - protein, 8 aa, Artificial Sequence
  Description of Artificial Sequence: Synthetic peptide
SFNATTEL

SEQ ID NO: 8341 - protein, 9 aa, Artificial Sequence
  Description of Artificial Sequence: Synthetic peptide
TYQIYQEPF

SEQ ID NO: 8342 - protein, 8 aa, Artificial Sequence
  Description of Artificial Sequence: Synthetic peptide
VYNTQGYF

SEQ ID NO: 8343 - protein, 9 aa, Artificial Sequence
  Description of Artificial Sequence: Synthetic peptide
SSTSRELQV

SEQ ID NO: 8344 - protein, 9 aa, Artificial Sequence
  Description of Artificial Sequence: Synthetic peptide
ASITLTVQV

SEQ ID NO: 8345 - protein, 9 aa, Artificial Sequence
  Description of Artificial Sequence: Synthetic peptide
SNITGLLLV

SEQ ID NO: 8346 - protein, 9 aa, Artificial Sequence
  Description of Artificial Sequence: Synthetic peptide
RSNITGLLL

SEQ ID NO: 8347 - protein, 10 aa, Artificial Sequence
  Description of Artificial Sequence: Synthetic peptide
KVVEIKPLGV

SEQ ID NO: 8348 - protein, 10 aa, Artificial Sequence
  Description of Artificial Sequence: Synthetic peptide
KVVEVKPLGV

SEQ ID NO: 8349 - protein, 9 aa, Artificial Sequence
  Description of Artificial Sequence: Synthetic peptide
ASVDYRLGV

SEQ ID NO: 8350 - protein, 9 aa, Artificial Sequence
  Description of Artificial Sequence: Synthetic peptide
YTNTIYRLL

SEQ ID NO: 8351 - protein, 9 aa, Artificial Sequence
  Description of Artificial Sequence: Synthetic peptide
RILQRLLFV

SEQ ID NO: 8352 - protein, 9 aa, Artificial Sequence
  Description of Artificial Sequence: Synthetic peptide
TNNAKIIIV

SEQ ID NO: 8353 - protein, 9 aa, Artificial Sequence
  Description of Artificial Sequence: Synthetic peptide
ANSPTSREL

SEQ ID NO: 8354 - protein, 9 aa, Artificial Sequence
  Description of Artificial Sequence: Synthetic peptide
GAASITLTV

SEQ ID NO: 8355 - protein, 8 aa, Artificial Sequence
  Description of Artificial Sequence: Synthetic peptide
NSSTSREL

SEQ ID NO: 8356 - protein, 9 aa, Artificial Sequence
  Description of Artificial Sequence: Synthetic peptide
SSTSRELQV

SEQ ID NO: 8357 - protein, 9 aa, Artificial Sequence
  Description of Artificial Sequence: Synthetic peptide
VSSGIRKVL

SEQ ID NO: 8358 - protein, 11 aa, Artificial Sequence
  Description of Artificial Sequence: Synthetic peptide
LAFPEGEAREF

SEQ ID NO: 8359 - protein, 9 aa, Artificial Sequence
  Description of Artificial Sequence: Synthetic peptide
ANSPTSREL

SEQ ID NO: 8360 - protein, 9 aa, Artificial Sequence
  Description of Artificial Sequence: Synthetic peptide
KAKPPLPSV

SEQ ID NO: 8361 - protein, 10 aa, Artificial Sequence
  Description of Artificial Sequence: Synthetic peptide
IATDIQTKEL

SEQ ID NO: 8362 - protein, 10 aa, Artificial Sequence
  Description of Artificial Sequence: Synthetic peptide
IASDIQTKEL

SEQ ID NO: 8363 - protein, 10 aa, Artificial Sequence
  Description of Artificial Sequence: Synthetic peptide
IATDLQTKEL

SEQ ID NO: 8364 - protein, 9 aa, Artificial Sequence
  Description of Artificial Sequence: Synthetic peptide
QAKGLGISY

SEQ ID NO: 8365 - protein, 9 aa, Artificial Sequence
  Description of Artificial Sequence: Synthetic peptide
KAIEAQQHM

SEQ ID NO: 8366 - protein, 9 aa, Artificial Sequence
  Description of Artificial Sequence: Synthetic peptide
RAIEAQQHL

SEQ ID NO: 8367 - protein, 9 aa, Artificial Sequence
  Description of Artificial Sequence: Synthetic peptide
RAIEAQQHM

SEQ ID NO: 8368 - protein, 9 aa, Artificial Sequence
  Description of Artificial Sequence: Synthetic peptide
GAASITLTV

SEQ ID NO: 8369 - protein, 9 aa, Artificial Sequence
  Description of Artificial Sequence: Synthetic peptide
AEGETIIRF

SEQ ID NO: 8370 - protein, 11 aa, Artificial Sequence
  Description of Artificial Sequence: Synthetic peptide
AEIQKQGQNQW

SEQ ID NO: 8371 - protein, 11 aa, Artificial Sequence
  Description of Artificial Sequence: Synthetic peptide
AEIQKQGNDQW

SEQ ID NO: 8372 - protein, 9 aa, Artificial Sequence
  Description of Artificial Sequence: Synthetic peptide
IRIGPGQTF

SEQ ID NO: 8373 - protein, 11 aa, Artificial Sequence
  Description of Artificial Sequence: Synthetic peptide
AEIQKQGQDQW

SEQ ID NO: 8374 - protein, 11 aa, Artificial Sequence
  Description of Artificial Sequence: Synthetic peptide
SEVNIVTDSQY

SEQ ID NO: 8375 - protein, 9 aa, Artificial Sequence
  Description of Artificial Sequence: Synthetic peptide
IRIGPGQAF

SEQ ID NO: 8376 - protein, 9 aa, Artificial Sequence
  Description of Artificial Sequence: Synthetic peptide
IRIGPGQVF

SEQ ID NO: 8377 - protein, 9 aa, Artificial Sequence
  Description of Artificial Sequence: Synthetic peptide
QAKGLGISY

SEQ ID NO: 8378 - protein, 9 aa, Artificial Sequence
  Description of Artificial Sequence: Synthetic peptide
EEINLPGKW

SEQ ID NO: 8379 - protein, 11 aa, Artificial Sequence
  Description of Artificial Sequence: Synthetic peptide
SEANIVTDSQY

SEQ ID NO: 8380 - protein, 9 aa, Artificial Sequence
  Description of Artificial Sequence: Synthetic peptide
EEVSLPGKW

SEQ ID NO: 8381 - protein, 11 aa, Artificial Sequence
  Description of Artificial Sequence: Synthetic peptide
AEQATQDVKNW

SEQ ID NO: 8382 - protein, 9 aa, Artificial Sequence
  Description of Artificial Sequence: Synthetic peptide
KALTDIVTL

SEQ ID NO: 8383 - protein, 9 aa, Artificial Sequence
  Description of Artificial Sequence: Synthetic peptide
MIVGGVIGL

SEQ ID NO: 8384 - protein, 8 aa, Artificial Sequence
  Description of Artificial Sequence: Synthetic peptide
VAARVLEL

SEQ ID NO: 8385 - protein, 10 aa, Artificial Sequence
  Description of Artificial Sequence: Synthetic peptide
RAVGIGAVFL

SEQ ID NO: 8386 - protein, 8 aa, Artificial Sequence
  Description of Artificial Sequence: Synthetic peptide
IAARAVEL

SEQ ID NO: 8387 - protein, 8 aa, Artificial Sequence
  Description of Artificial Sequence: Synthetic peptide
IAARTVEL

SEQ ID NO: 8388 - protein, 10 aa, Artificial Sequence
  Description of Artificial Sequence: Synthetic peptide
YAPPIEGIIM

SEQ ID NO: 8389 - protein, 8 aa, Artificial Sequence
  Description of Artificial Sequence: Synthetic peptide
FALNPDLL

SEQ ID NO: 8390 - protein, 9 aa, Artificial Sequence
  Description of Artificial Sequence: Synthetic peptide
TSEPIPIHY

SEQ ID NO: 8391 - protein, 11 aa, Artificial Sequence
  Description of Artificial Sequence: Synthetic peptide
ISEAQDDHDKY

SEQ ID NO: 8392 - protein, 9 aa, Artificial Sequence
  Description of Artificial Sequence: Synthetic peptide
GTEELRSLY

SEQ ID NO: 8393 - protein, 9 aa, Artificial Sequence
  Description of Artificial Sequence: Synthetic peptide
GSEEIKSLY

SEQ ID NO: 8394 - protein, 8 aa, Artificial Sequence
  Description of Artificial Sequence: Synthetic peptide
VLDVGDAY

SEQ ID NO: 8395 - protein, 10 aa, Artificial Sequence
  Description of Artificial Sequence: Synthetic peptide
VTVLDVGDAY

SEQ ID NO: 8396 - protein, 10 aa, Artificial Sequence
  Description of Artificial Sequence: Synthetic peptide
PSETGQETAY

SEQ ID NO: 8397 - protein, 9 aa, Artificial Sequence
  Description of Artificial Sequence: Synthetic peptide
LADQLIHMY

SEQ ID NO: 8398 - protein, 9 aa, Artificial Sequence
  Description of Artificial Sequence: Synthetic peptide
SLYNTVVTL

SEQ ID NO: 8399 - protein, 9 aa, Artificial Sequence
  Description of Artificial Sequence: Synthetic peptide
SLYNTVATL

SEQ ID NO: 8400 - protein, 9 aa, Artificial Sequence
  Description of Artificial Sequence: Synthetic peptide
VLAEAMSQA

SEQ ID NO: 8401 - protein, 9 aa, Artificial Sequence
  Description of Artificial Sequence: Synthetic peptide
AVLSVVNRV

SEQ ID NO: 8402 - protein, 9 aa, Artificial Sequence
  Description of Artificial Sequence: Synthetic peptide
ILKEPVHGV

SEQ ID NO: 8403 - protein, 9 aa, Artificial Sequence
  Description of Artificial Sequence: Synthetic peptide
SLFNTVATL

SEQ ID NO: 8404 - protein, 9 aa, Artificial Sequence
  Description of Artificial Sequence: Synthetic peptide
GLADQLIHI

SEQ ID NO: 8405 - protein, 9 aa, Artificial Sequence
  Description of Artificial Sequence: Synthetic peptide
QLTEAVQKI

SEQ ID NO: 8406 - protein, 9 aa, Artificial Sequence
  Description of Artificial Sequence: Synthetic peptide
ILGQLQPAL

SEQ ID NO: 8407 - protein, 9 aa, Artificial Sequence
  Description of Artificial Sequence: Synthetic peptide
QLAEAVQRI

SEQ ID NO: 8408 - protein, 9 aa, Artificial Sequence
  Description of Artificial Sequence: Synthetic peptide
ALIEICSEL

SEQ ID NO: 8409 - protein, 9 aa, Artificial Sequence
  Description of Artificial Sequence: Synthetic peptide
AMSQATNSV

SEQ ID NO: 8410 - protein, 9 aa, Artificial Sequence
  Description of Artificial Sequence: Synthetic peptide
ALTEICTEM

SEQ ID NO: 8411 - protein, 10 aa, Artificial Sequence
  Description of Artificial Sequence: Synthetic peptide
TLWQRPVVTV

SEQ ID NO: 8412 - protein, 9 aa, Artificial Sequence
  Description of Artificial Sequence: Synthetic peptide
RLINCTTSV

SEQ ID NO: 8413 - protein, 9 aa, Artificial Sequence
  Description of Artificial Sequence: Synthetic peptide
IITDSQYAL

SEQ ID NO: 8414 - protein, 9 aa, Artificial Sequence
  Description of Artificial Sequence: Synthetic peptide
AVLSLVNRV

SEQ ID NO: 8415 - protein, 9 aa, Artificial Sequence
  Description of Artificial Sequence: Synthetic peptide
IVTDSQYAL

SEQ ID NO: 8416 - protein, 9 aa, Artificial Sequence
  Description of Artificial Sequence: Synthetic peptide
ILKEPVHGV

SEQ ID NO: 8417 - protein, 9 aa, Artificial Sequence
  Description of Artificial Sequence: Synthetic peptide
VLAEAMSQA

SEQ ID NO: 8418 - protein, 9 aa, Artificial Sequence
  Description of Artificial Sequence: Synthetic peptide
SLYNTVATL

SEQ ID NO: 8419 - protein, 9 aa, Artificial Sequence
  Description of Artificial Sequence: Synthetic peptide
VVKIEPLGV

SEQ ID NO: 8420 - protein, 9 aa, Artificial Sequence
  Description of Artificial Sequence: Synthetic peptide
QLAEAVQRI

SEQ ID NO: 8421 - protein, 9 aa, Artificial Sequence
  Description of Artificial Sequence: Synthetic peptide
SLFNTVATL

SEQ ID NO: 8422 - protein, 9 aa, Artificial Sequence
  Description of Artificial Sequence: Synthetic peptide
SLYNTVVTL

SEQ ID NO: 8423 - protein, 9 aa, Artificial Sequence
  Description of Artificial Sequence: Synthetic peptide
ILKEPVHGA

SEQ ID NO: 8424 - protein, 9 aa, Artificial Sequence
  Description of Artificial Sequence: Synthetic peptide
NIIGNIRQA

SEQ ID NO: 8425 - protein, 9 aa, Artificial Sequence
  Description of Artificial Sequence: Synthetic peptide
QIKPPLPSV

SEQ ID NO: 8426 - protein, 9 aa, Artificial Sequence
  Description of Artificial Sequence: Synthetic peptide
AMSQATNSV

SEQ ID NO: 8427 - protein, 9 aa, Artificial Sequence
  Description of Artificial Sequence: Synthetic peptide
QLQARILAV

SEQ ID NO: 8428 - protein, 10 aa, Artificial Sequence
  Description of Artificial Sequence: Synthetic peptide
YLKDQQLLGI

SEQ ID NO: 8429 - protein, 9 aa, Artificial Sequence
  Description of Artificial Sequence: Synthetic peptide
KIKPPLPSV

SEQ ID NO: 8430 - protein, 9 aa, Artificial Sequence
  Description of Artificial Sequence: Synthetic peptide
QLKKIIGQV

SEQ ID NO: 8431 - protein, 11 aa, Artificial Sequence
  Description of Artificial Sequence: Synthetic peptide
FLKDKGGLEGL

SEQ ID NO: 8432 - protein, 10 aa, Artificial Sequence
  Description of Artificial Sequence: Synthetic peptide
ALTEVIPLTA

SEQ ID NO: 8433 - protein, 9 aa, Artificial Sequence
  Description of Artificial Sequence: Synthetic peptide
VVRIEPIGV

SEQ ID NO: 8434 - protein, 10 aa, Artificial Sequence
  Description of Artificial Sequence: Synthetic peptide
TLWQRPVVTV

SEQ ID NO: 8435 - protein, 9 aa, Artificial Sequence
  Description of Artificial Sequence: Synthetic peptide
AVLSVVNRV

SEQ ID NO: 8436 - protein, 10 aa, Artificial Sequence
  Description of Artificial Sequence: Synthetic peptide
ILIATRIVGL

SEQ ID NO: 8437 - protein, 9 aa, Artificial Sequence
  Description of Artificial Sequence: Synthetic peptide
ALFYKLDVV

SEQ ID NO: 8438 - protein, 9 aa, Artificial Sequence
  Description of Artificial Sequence: Synthetic peptide
ALKTGTEEL

SEQ ID NO: 8439 - protein, 9 aa, Artificial Sequence
  Description of Artificial Sequence: Synthetic peptide
ELKSLFNTV

SEQ ID NO: 8440 - protein, 8 aa, Artificial Sequence
  Description of Artificial Sequence: Synthetic peptide
VLSVVNRV

SEQ ID NO: 8441 - protein, 10 aa, Artificial Sequence
  Description of Artificial Sequence: Synthetic peptide
ALFLGFLGTA

SEQ ID NO: 8442 - protein, 9 aa, Artificial Sequence
  Description of Artificial Sequence: Synthetic peptide
QLQARVLAV

SEQ ID NO: 8443 - protein, 11 aa, Artificial Sequence
  Description of Artificial Sequence: Synthetic peptide
FLKEKGGLEGL

SEQ ID NO: 8444 - protein, 9 aa, Artificial Sequence
  Description of Artificial Sequence: Synthetic peptide
TVFSLVNRV

SEQ ID NO: 8445 - protein, 9 aa, Artificial Sequence
  Description of Artificial Sequence: Synthetic peptide
ALIEICSEL

SEQ ID NO: 8446 - protein, 9 aa, Artificial Sequence
  Description of Artificial Sequence: Synthetic peptide
ALNPGLLET

SEQ ID NO: 8447 - protein, 9 aa, Artificial Sequence
  Description of Artificial Sequence: Synthetic peptide
QLTEAVQKI

SEQ ID NO: 8448 - protein, 9 aa, Artificial Sequence
  Description of Artificial Sequence: Synthetic peptide
TLWQRPLVA

SEQ ID NO: 8449 - protein, 9 aa, Artificial Sequence
  Description of Artificial Sequence: Synthetic peptide
ILRETVHGA

SEQ ID NO: 8450 - protein, 10 aa, Artificial Sequence
  Description of Artificial Sequence: Synthetic peptide
ALIWDDLRSL

SEQ ID NO: 8451 - protein, 9 aa, Artificial Sequence
  Description of Artificial Sequence: Synthetic peptide
GAASVTLTV

SEQ ID NO: 8452 - protein, 9 aa, Artificial Sequence
  Description of Artificial Sequence: Synthetic peptide
NVKTIIVQL

SEQ ID NO: 8453 - protein, 9 aa, Artificial Sequence
  Description of Artificial Sequence: Synthetic peptide
ALSPRTLNA

SEQ ID NO: 8454 - protein, 10 aa, Artificial Sequence
  Description of Artificial Sequence: Synthetic peptide
ALIWDDLRNL

SEQ ID NO: 8455 - protein, 10 aa, Artificial Sequence
  Description of Artificial Sequence: Synthetic peptide
SLFDAIAIAV

SEQ ID NO: 8456 - protein, 9 aa, Artificial Sequence
  Description of Artificial Sequence: Synthetic peptide
ELKKIIGQV

SEQ ID NO: 8457 - protein, 10 aa, Artificial Sequence
  Description of Artificial Sequence: Synthetic peptide
VLFLDGISEA

SEQ ID NO: 8458 - protein, 9 aa, Artificial Sequence
  Description of Artificial Sequence: Synthetic peptide
VVQIEPLGV

SEQ ID NO: 8459 - protein, 9 aa, Artificial Sequence
  Description of Artificial Sequence: Synthetic peptide
MIIGGLIGL

SEQ ID NO: 8460 - protein, 10 aa, Artificial Sequence
  Description of Artificial Sequence: Synthetic peptide
KLVSQGIRKV

SEQ ID NO: 8461 - protein, 9 aa, Artificial Sequence
  Description of Artificial Sequence: Synthetic peptide
RLINCTTSV

SEQ ID NO: 8462 - protein, 10 aa, Artificial Sequence
  Description of Artificial Sequence: Synthetic peptide
KVVKIEPLGV

SEQ ID NO: 8463 - protein, 9 aa, Artificial Sequence
  Description of Artificial Sequence: Synthetic peptide
AVLSLVNRV

SEQ ID NO: 8464 - protein, 9 aa, Artificial Sequence
  Description of Artificial Sequence: Synthetic peptide
SLFNAVAVL

SEQ ID NO: 8465 - protein, 9 aa, Artificial Sequence
  Description of Artificial Sequence: Synthetic peptide
GLADQLIHI

SEQ ID NO: 8466 - protein, 10 aa, Artificial Sequence
  Description of Artificial Sequence: Synthetic peptide
GLIGLRIVFA

SEQ ID NO: 8467 - protein, 9 aa, Artificial Sequence
  Description of Artificial Sequence: Synthetic peptide
LIAARIVEL

SEQ ID NO: 8468 - protein, 10 aa, Artificial Sequence
  Description of Artificial Sequence: Synthetic peptide
KVVQIEPLGV

SEQ ID NO: 8469 - protein, 9 aa, Artificial Sequence
  Description of Artificial Sequence: Synthetic peptide
KVIGDIRQA

SEQ ID NO: 8470 - protein, 8 aa, Artificial Sequence
  Description of Artificial Sequence: Synthetic peptide
VLSLVNRV

SEQ ID NO: 8471 - protein, 9 aa, Artificial Sequence
  Description of Artificial Sequence: Synthetic peptide
GAASLTLTV

SEQ ID NO: 8472 - protein, 9 aa, Artificial Sequence
  Description of Artificial Sequence: Synthetic peptide
GQALFTTKV

SEQ ID NO: 8473 - protein, 10 aa, Artificial Sequence
  Description of Artificial Sequence: Synthetic peptide
ILIAVRIVEL

SEQ ID NO: 8474 - protein, 9 aa, Artificial Sequence
  Description of Artificial Sequence: Synthetic peptide
LLNTTAIAV

SEQ ID NO: 8475 - protein, 9 aa, Artificial Sequence
  Description of Artificial Sequence: Synthetic peptide
LLQYWIQEL

SEQ ID NO: 8476 - protein, 9 aa, Artificial Sequence
  Description of Artificial Sequence: Synthetic peptide
SLYNTVVTL

SEQ ID NO: 8477 - protein, 9 aa, Artificial Sequence
  Description of Artificial Sequence: Synthetic peptide
SISNWLWYI

SEQ ID NO: 8478 - protein, 9 aa, Artificial Sequence
  Description of Artificial Sequence: Synthetic peptide
SITQWLWYI

SEQ ID NO: 8479 - protein, 9 aa, Artificial Sequence
  Description of Artificial Sequence: Synthetic peptide
SLFNTVATL

SEQ ID NO: 8480 - protein, 9 aa, Artificial Sequence
  Description of Artificial Sequence: Synthetic peptide
SLYNTVATL

SEQ ID NO: 8481 - protein, 9 aa, Artificial Sequence
  Description of Artificial Sequence: Synthetic peptide
AVLSVVNRV

SEQ ID NO: 8482 - protein, 10 aa, Artificial Sequence
  Description of Artificial Sequence: Synthetic peptide
NLLQYWIQEL

SEQ ID NO: 8483 - protein, 9 aa, Artificial Sequence
  Description of Artificial Sequence: Synthetic peptide
ILKEPVHGV

SEQ ID NO: 8484 - protein, 10 aa, Artificial Sequence
  Description of Artificial Sequence: Synthetic peptide
ALIWDDLRNL

SEQ ID NO: 8485 - protein, 9 aa, Artificial Sequence
  Description of Artificial Sequence: Synthetic peptide
ILAIVVWTI

SEQ ID NO: 8486 - protein, 9 aa, Artificial Sequence
  Description of Artificial Sequence: Synthetic peptide
GLADQLIHI

SEQ ID NO: 8487 - protein, 9 aa, Artificial Sequence
  Description of Artificial Sequence: Synthetic peptide
AVLSLVNRV

SEQ ID NO: 8488 - protein, 9 aa, Artificial Sequence
  Description of Artificial Sequence: Synthetic peptide
VVSQIIEQL

SEQ ID NO: 8489 - protein, 9 aa, Artificial Sequence
  Description of Artificial Sequence: Synthetic peptide
LIWDDLRNL

SEQ ID NO: 8490 - protein, 10 aa, Artificial Sequence
  Description of Artificial Sequence: Synthetic peptide
ALIWDDLRSL

SEQ ID NO: 8491 - protein, 9 aa, Artificial Sequence
  Description of Artificial Sequence: Synthetic peptide
AILNIPVRI

SEQ ID NO: 8492 - protein, 9 aa, Artificial Sequence
  Description of Artificial Sequence: Synthetic peptide
LLQYWSQEL

SEQ ID NO: 8493 - protein, 9 aa, Artificial Sequence
  Description of Artificial Sequence: Synthetic peptide
ILGQLQPAL

SEQ ID NO: 8494 - protein, 9 aa, Artificial Sequence
  Description of Artificial Sequence: Synthetic peptide
ALTEIIPLT

SEQ ID NO: 8495 - protein, 9 aa, Artificial Sequence
  Description of Artificial Sequence: Synthetic peptide
TLNAWVKVI

SEQ ID NO: 8496 - protein, 9 aa, Artificial Sequence
  Description of Artificial Sequence: Synthetic peptide
ALIEICSEL

SEQ ID NO: 8497 - protein, 9 aa, Artificial Sequence
  Description of Artificial Sequence: Synthetic peptide
LIWDDLRSL

SEQ ID NO: 8498 - protein, 10 aa, Artificial Sequence
  Description of Artificial Sequence: Synthetic peptide
TLWQRPLVTI

SEQ ID NO: 8499 - protein, 9 aa, Artificial Sequence
  Description of Artificial Sequence: Synthetic peptide
HLWKWGTML

SEQ ID NO: 8500 - protein, 10 aa, Artificial Sequence
  Description of Artificial Sequence: Synthetic peptide
ILIAVRIVEL

SEQ ID NO: 8501 - protein, 9 aa, Artificial Sequence
  Description of Artificial Sequence: Synthetic peptide
GLFNSTWNI

SEQ ID NO: 8502 - protein, 10 aa, Artificial Sequence
  Description of Artificial Sequence: Synthetic peptide
ILIATRIVGL

SEQ ID NO: 8503 - protein, 9 aa, Artificial Sequence
  Description of Artificial Sequence: Synthetic peptide
LVNQIIEQL

SEQ ID NO: 8504 - protein, 9 aa, Artificial Sequence
  Description of Artificial Sequence: Synthetic peptide
LVSQIIEQL

SEQ ID NO: 8505 - protein, 9 aa, Artificial Sequence
  Description of Artificial Sequence: Synthetic peptide
MIIGGLIGL

SEQ ID NO: 8506 - protein, 9 aa, Artificial Sequence
  Description of Artificial Sequence: Synthetic peptide
KIKPPLPSV

SEQ ID NO: 8507 - protein, 10 aa, Artificial Sequence
  Description of Artificial Sequence: Synthetic peptide
TLWQRPVVTV

SEQ ID NO: 8508 - protein, 10 aa, Artificial Sequence
  Description of Artificial Sequence: Synthetic peptide
ILIAARIVEL

SEQ ID NO: 8509 - protein, 9 aa, Artificial Sequence
  Description of Artificial Sequence: Synthetic peptide
ALFYKLDVV

SEQ ID NO: 8510 - protein, 9 aa, Artificial Sequence
  Description of Artificial Sequence: Synthetic peptide
TVFSLVNRV

SEQ ID NO: 8511 - protein, 9 aa, Artificial Sequence
  Description of Artificial Sequence: Synthetic peptide
SLFNAVAVL

SEQ ID NO: 8512 - protein, 9 aa, Artificial Sequence
  Description of Artificial Sequence: Synthetic peptide
ALTEVIPLT

SEQ ID NO: 8513 - protein, 10 aa, Artificial Sequence
  Description of Artificial Sequence: Synthetic peptide
SLLNVTAIAV

SEQ ID NO: 8514 - protein, 9 aa, Artificial Sequence
  Description of Artificial Sequence: Synthetic peptide
QLQARILAV

SEQ ID NO: 8515 - protein, 9 aa, Artificial Sequence
  Description of Artificial Sequence: Synthetic peptide
LIAARIVEL

SEQ ID NO: 8516 - protein, 10 aa, Artificial Sequence
  Description of Artificial Sequence: Synthetic peptide
SLFDAIAIAV

SEQ ID NO: 8517 - protein, 9 aa, Artificial Sequence
  Description of Artificial Sequence: Synthetic peptide
HLWRWGIML

SEQ ID NO: 8518 - protein, 9 aa, Artificial Sequence
  Description of Artificial Sequence: Synthetic peptide
LLNTTAIAV

SEQ ID NO: 8519 - protein, 9 aa, Artificial Sequence
  Description of Artificial Sequence: Synthetic peptide
TVNDIQNLV

SEQ ID NO: 8520 - protein, 9 aa, Artificial Sequence
  Description of Artificial Sequence: Synthetic peptide
LLNKTIIKF

SEQ ID NO: 8521 - protein, 9 aa, Artificial Sequence
  Description of Artificial Sequence: Synthetic peptide
VIWGKIPKF

SEQ ID NO: 8522 - protein, 9 aa, Artificial Sequence
  Description of Artificial Sequence: Synthetic peptide
AALDLSHFL

SEQ ID NO: 8523 - protein, 10 aa, Artificial Sequence
  Description of Artificial Sequence: Synthetic peptide
TLWQRPLVAI

SEQ ID NO: 8524 - protein, 11 aa, Artificial Sequence
  Description of Artificial Sequence: Synthetic peptide
FLKDKGGLEGL

SEQ ID NO: 8525 - protein, 9 aa, Artificial Sequence
  Description of Artificial Sequence: Synthetic peptide
LLNKTIINF

SEQ ID NO: 8526 - protein, 9 aa, Artificial Sequence
  Description of Artificial Sequence: Synthetic peptide
IIAIVVWTI

SEQ ID NO: 8527 - protein, 9 aa, Artificial Sequence
  Description of Artificial Sequence: Synthetic peptide
NVKTIIVQL

SEQ ID NO: 8528 - protein, 9 aa, Artificial Sequence
  Description of Artificial Sequence: Synthetic peptide
TVSFNLPQI

SEQ ID NO: 8529 - protein, 9 aa, Artificial Sequence
  Description of Artificial Sequence: Synthetic peptide
IITDSQYAL

SEQ ID NO: 8530 - protein, 9 aa, Artificial Sequence
  Description of Artificial Sequence: Synthetic peptide
LLRYWSQEL

SEQ ID NO: 8531 - protein, 11 aa, Artificial Sequence
  Description of Artificial Sequence: Synthetic peptide
RHFPGPWLHSL

SEQ ID NO: 8532 - protein, 10 aa, Artificial Sequence
  Description of Artificial Sequence: Synthetic peptide
NLLQYWSQEL

SEQ ID NO: 8533 - protein, 9 aa, Artificial Sequence
  Description of Artificial Sequence: Synthetic peptide
YQSNPPPSL

SEQ ID NO: 8534 - protein, 9 aa, Artificial Sequence
  Description of Artificial Sequence: Synthetic peptide
QIKPPLPSV

SEQ ID NO: 8535 - protein, 9 aa, Artificial Sequence
  Description of Artificial Sequence: Synthetic peptide
IVTDSQYAL

SEQ ID NO: 8536 - protein, 9 aa, Artificial Sequence
  Description of Artificial Sequence: Synthetic peptide
HLEGKVILV

SEQ ID NO: 8537 - protein, 9 aa, Artificial Sequence
  Description of Artificial Sequence: Synthetic peptide
TLQQVATKL

SEQ ID NO: 8538 - protein, 11 aa, Artificial Sequence
  Description of Artificial Sequence: Synthetic peptide
FLKEKGGLEGL

SEQ ID NO: 8539 - protein, 9 aa, Artificial Sequence
  Description of Artificial Sequence: Synthetic peptide
QVQALFYKL

SEQ ID NO: 8540 - protein, 9 aa, Artificial Sequence
  Description of Artificial Sequence: Synthetic peptide
QLAEAVQRI

SEQ ID NO: 8541 - protein, 9 aa, Artificial Sequence
  Description of Artificial Sequence: Synthetic peptide
YQLEKEPIV

SEQ ID NO: 8542 - protein, 9 aa, Artificial Sequence
  Description of Artificial Sequence: Synthetic peptide
ALNPGLLET

SEQ ID NO: 8543 - protein, 9 aa, Artificial Sequence
  Description of Artificial Sequence: Synthetic peptide
FPGPWLHSL

SEQ ID NO: 8544 - protein, 9 aa, Artificial Sequence
  Description of Artificial Sequence: Synthetic peptide
DILKYLWNL

SEQ ID NO: 8545 - protein, 9 aa, Artificial Sequence
  Description of Artificial Sequence: Synthetic peptide
LLQLTVWGI

SEQ ID NO: 8546 - protein, 10 aa, Artificial Sequence
  Description of Artificial Sequence: Synthetic peptide
TLLNKTIIKF

SEQ ID NO: 8547 - protein, 9 aa, Artificial Sequence
  Description of Artificial Sequence: Synthetic peptide
AIIRILQQL

SEQ ID NO: 8548 - protein, 11 aa, Artificial Sequence
  Description of Artificial Sequence: Synthetic peptide
GLFNSTWNISA

SEQ ID NO: 8549 - protein, 9 aa, Artificial Sequence
  Description of Artificial Sequence: Synthetic peptide
HLIWASNEL

SEQ ID NO: 8550 - protein, 9 aa, Artificial Sequence
  Description of Artificial Sequence: Synthetic peptide
SLNEIWQNM

SEQ ID NO: 8551 - protein, 11 aa, Artificial Sequence
  Description of Artificial Sequence: Synthetic peptide
VQLGIPHPAGL

SEQ ID NO: 8552 - protein, 10 aa, Artificial Sequence
  Description of Artificial Sequence: Synthetic peptide
RTQDFWEVQL

SEQ ID NO: 8553 - protein, 9 aa, Artificial Sequence
  Description of Artificial Sequence: Synthetic peptide
LIAVRIVEL

SEQ ID NO: 8554 - protein, 9 aa, Artificial Sequence
  Description of Artificial Sequence: Synthetic peptide
LLNVTAIAV

SEQ ID NO: 8555 - protein, 10 aa, Artificial Sequence
  Description of Artificial Sequence: Synthetic peptide
NLLRYWSQEL

SEQ ID NO: 8556 - protein, 9 aa, Artificial Sequence
  Description of Artificial Sequence: Synthetic peptide
YQLEKEPII

SEQ ID NO: 8557 - protein, 9 aa, Artificial Sequence
  Description of Artificial Sequence: Synthetic peptide
LIATRIVGL

SEQ ID NO: 8558 - protein, 9 aa, Artificial Sequence
  Description of Artificial Sequence: Synthetic peptide
KLTPLCVTL

SEQ ID NO: 8559 - protein, 9 aa, Artificial Sequence
  Description of Artificial Sequence: Synthetic peptide
RVIEIIQRA

SEQ ID NO: 8560 - protein, 9 aa, Artificial Sequence
  Description of Artificial Sequence: Synthetic peptide
VVSQIIEQL

SEQ ID NO: 8561 - protein, 9 aa, Artificial Sequence
  Description of Artificial Sequence: Synthetic peptide
KVIGDIRQA

SEQ ID NO: 8562 - protein, 9 aa, Artificial Sequence
  Description of Artificial Sequence: Synthetic peptide
LVSQIIEQL

SEQ ID NO: 8563 - protein, 9 aa, Artificial Sequence
  Description of Artificial Sequence: Synthetic peptide
TVFSLVNRV

SEQ ID NO: 8564 - protein, 9 aa, Artificial Sequence
  Description of Artificial Sequence: Synthetic peptide
VVAKEIVAC

SEQ ID NO: 8565 - protein, 11 aa, Artificial Sequence
  Description of Artificial Sequence: Synthetic peptide
TQIDPGLADQL

SEQ ID NO: 8566 - protein, 9 aa, Artificial Sequence
  Description of Artificial Sequence: Synthetic peptide
NIIGNIRQA

SEQ ID NO: 8567 - protein, 9 aa, Artificial Sequence
  Description of Artificial Sequence: Synthetic peptide
VLAEAMSQA

SEQ ID NO: 8568 - protein, 9 aa, Artificial Sequence
  Description of Artificial Sequence: Synthetic peptide
AVLSVVNRV

SEQ ID NO: 8569 - protein, 10 aa, Artificial Sequence
  Description of Artificial Sequence: Synthetic peptide
GVVESMNNQL

SEQ ID NO: 8570 - protein, 9 aa, Artificial Sequence
  Description of Artificial Sequence: Synthetic peptide
SQATNVNAA

SEQ ID NO: 8571 - protein, 9 aa, Artificial Sequence
  Description of Artificial Sequence: Synthetic peptide
AVAEGTDRV

SEQ ID NO: 8572 - protein, 9 aa, Artificial Sequence
  Description of Artificial Sequence: Synthetic peptide
GQALFTTKV

SEQ ID NO: 8573 - protein, 11 aa, Artificial Sequence
  Description of Artificial Sequence: Synthetic peptide
TQVDPGLADQL

SEQ ID NO: 8574 - protein, 9 aa, Artificial Sequence
  Description of Artificial Sequence: Synthetic peptide
QLAEAVQRI

SEQ ID NO: 8575 - protein, 11 aa, Artificial Sequence
  Description of Artificial Sequence: Synthetic peptide
VVIQDNSDIKV

SEQ ID NO: 8576 - protein, 10 aa, Artificial Sequence
  Description of Artificial Sequence: Synthetic peptide
SEFNLPPVVA

SEQ ID NO: 8577 - protein, 9 aa, Artificial Sequence
  Description of Artificial Sequence: Synthetic peptide
SAVSLFNTI

SEQ ID NO: 8578 - protein, 9 aa, Artificial Sequence
  Description of Artificial Sequence: Synthetic peptide
RIIEIIQRA

SEQ ID NO: 8579 - protein, 10 aa, Artificial Sequence
  Description of Artificial Sequence: Synthetic peptide
SQATAGMNAA

SEQ ID NO: 8580 - protein, 9 aa, Artificial Sequence
  Description of Artificial Sequence: Synthetic peptide
WTVNDIQKL

SEQ ID NO: 8581 - protein, 9 aa, Artificial Sequence
  Description of Artificial Sequence: Synthetic peptide
ATLEEMMTA

SEQ ID NO: 8582 - protein, 9 aa, Artificial Sequence
  Description of Artificial Sequence: Synthetic peptide
IVTDSQYAL

SEQ ID NO: 8583 - protein, 9 aa, Artificial Sequence
  Description of Artificial Sequence: Synthetic peptide
REFPSEQTP

SEQ ID NO: 8584 - protein, 10 aa, Artificial Sequence
  Description of Artificial Sequence: Synthetic peptide
QVAEKLGNLL

SEQ ID NO: 8585 - protein, 9 aa, Artificial Sequence
  Description of Artificial Sequence: Synthetic peptide
ALIEICSEL

SEQ ID NO: 8586 - protein, 9 aa, Artificial Sequence
  Description of Artificial Sequence: Synthetic peptide
CTTSVITQA

SEQ ID NO: 8587 - protein, 9 aa, Artificial Sequence
  Description of Artificial Sequence: Synthetic peptide
MIIGGLIGL

SEQ ID NO: 8588 - protein, 9 aa, Artificial Sequence
  Description of Artificial Sequence: Synthetic peptide
YQSNPPPSL

SEQ ID NO: 8589 - protein, 9 aa, Artificial Sequence
  Description of Artificial Sequence: Synthetic peptide
AVLSLVNRV

SEQ ID NO: 8590 - protein, 9 aa, Artificial Sequence
  Description of Artificial Sequence: Synthetic peptide
SLFNTVATL

SEQ ID NO: 8591 - protein, 9 aa, Artificial Sequence
  Description of Artificial Sequence: Synthetic peptide
VVIQDNSEI

SEQ ID NO: 8592 - protein, 9 aa, Artificial Sequence
  Description of Artificial Sequence: Synthetic peptide
STKEALDKI

SEQ ID NO: 8593 - protein, 9 aa, Artificial Sequence
  Description of Artificial Sequence: Synthetic peptide
NVKTIIVQL

SEQ ID NO: 8594 - protein, 9 aa, Artificial Sequence
  Description of Artificial Sequence: Synthetic peptide
GQTFFTAEV

SEQ ID NO: 8595 - protein, 9 aa, Artificial Sequence
  Description of Artificial Sequence: Synthetic peptide
LVNQIIEQL

SEQ ID NO: 8596 - protein, 9 aa, Artificial Sequence
  Description of Artificial Sequence: Synthetic peptide
LEKEPIIGA

SEQ ID NO: 8597 - protein, 9 aa, Artificial Sequence
  Description of Artificial Sequence: Synthetic peptide
WTVNDIQNL

SEQ ID NO: 8598 - protein, 10 aa, Artificial Sequence
  Description of Artificial Sequence: Synthetic peptide
SQYALGIIQA

SEQ ID NO: 8599 - protein, 9 aa, Artificial Sequence
  Description of Artificial Sequence: Synthetic peptide
LEKEPIVGA

SEQ ID NO: 8600 - protein, 10 aa, Artificial Sequence
  Description of Artificial Sequence: Synthetic peptide
RELPSEQTRA

SEQ ID NO: 8601 - protein, 9 aa, Artificial Sequence
  Description of Artificial Sequence: Synthetic peptide
VVESMNNQL

SEQ ID NO: 8602 - protein, 9 aa, Artificial Sequence
  Description of Artificial Sequence: Synthetic peptide
SQATAGMNA

SEQ ID NO: 8603 - protein, 9 aa, Artificial Sequence
  Description of Artificial Sequence: Synthetic peptide
RAIELVQRA

SEQ ID NO: 8604 - protein, 9 aa, Artificial Sequence
  Description of Artificial Sequence: Synthetic peptide
RAIEAQQHL

SEQ ID NO: 8605 - protein, 9 aa, Artificial Sequence
  Description of Artificial Sequence: Synthetic peptide
STNSTNYRL

SEQ ID NO: 8606 - protein, 9 aa, Artificial Sequence
  Description of Artificial Sequence: Synthetic peptide
SQIYSGIKV

SEQ ID NO: 8607 - protein, 9 aa, Artificial Sequence
  Description of Artificial Sequence: Synthetic peptide
QLTEAVQKI

SEQ ID NO: 8608 - protein, 11 aa, Artificial Sequence
  Description of Artificial Sequence: Synthetic peptide
VVIQDNSEIKV

SEQ ID NO: 8609 - protein, 9 aa, Artificial Sequence
  Description of Artificial Sequence: Synthetic peptide
AEAMSQATA

SEQ ID NO: 8610 - protein, 9 aa, Artificial Sequence
  Description of Artificial Sequence: Synthetic peptide
SLYNTVVTL

SEQ ID NO: 8611 - protein, 10 aa, Artificial Sequence
  Description of Artificial Sequence: Synthetic peptide
AEWDKTLQQV

SEQ ID NO: 8612 - protein, 10 aa, Artificial Sequence
  Description of Artificial Sequence: Synthetic peptide
AEVTGDIRKA

SEQ ID NO: 8613 - protein, 9 aa, Artificial Sequence
  Description of Artificial Sequence: Synthetic peptide
SQIYPGIKV

SEQ ID NO: 8614 - protein, 9 aa, Artificial Sequence
  Description of Artificial Sequence: Synthetic peptide
ATAGMNAAI

SEQ ID NO: 8615 - protein, 9 aa, Artificial Sequence
  Description of Artificial Sequence: Synthetic peptide
TTSNLQEQI

SEQ ID NO: 8616 - protein, 9 aa, Artificial Sequence
  Description of Artificial Sequence: Synthetic peptide
SLYNTVATL

SEQ ID NO: 8617 - protein, 9 aa, Artificial Sequence
  Description of Artificial Sequence: Synthetic peptide
TETLLVQNA

SEQ ID NO: 8618 - protein, 9 aa, Artificial Sequence
  Description of Artificial Sequence: Synthetic peptide
TVNDIQNLV

SEQ ID NO: 8619 - protein, 9 aa, Artificial Sequence
  Description of Artificial Sequence: Synthetic peptide
EVIPLTAEA

SEQ ID NO: 8620 - protein, 9 aa, Artificial Sequence
  Description of Artificial Sequence: Synthetic peptide
ASVTLTVQA

SEQ ID NO: 8621 - protein, 9 aa, Artificial Sequence
  Description of Artificial Sequence: Synthetic peptide
IEVKDTKEA

SEQ ID NO: 8622 - protein, 9 aa, Artificial Sequence
  Description of Artificial Sequence: Synthetic peptide
FTSAAVKAA

SEQ ID NO: 8623 - protein, 9 aa, Artificial Sequence
  Description of Artificial Sequence: Synthetic peptide
NESVKITCA

SEQ ID NO: 8624 - protein, 9 aa, Artificial Sequence
  Description of Artificial Sequence: Synthetic peptide
EAVDLSHFL

SEQ ID NO: 8625 - protein, 9 aa, Artificial Sequence
  Description of Artificial Sequence: Synthetic peptide
ILKEPVHGV

SEQ ID NO: 8626 - protein, 9 aa, Artificial Sequence
  Description of Artificial Sequence: Synthetic peptide
NAKNIIVQL

SEQ ID NO: 8627 - protein, 9 aa, Artificial Sequence
  Description of Artificial Sequence: Synthetic peptide
AVLSVVNRV

SEQ ID NO: 8628 - protein, 9 aa, Artificial Sequence
  Description of Artificial Sequence: Synthetic peptide
IVTDSQYAL

SEQ ID NO: 8629 - protein, 9 aa, Artificial Sequence
  Description of Artificial Sequence: Synthetic peptide
IQDNSDIKV

SEQ ID NO: 8630 - protein, 11 aa, Artificial Sequence
  Description of Artificial Sequence: Synthetic peptide
VVIQDNSDIKV

SEQ ID NO: 8631 - protein, 9 aa, Artificial Sequence
  Description of Artificial Sequence: Synthetic peptide
IQDNSEIKV

SEQ ID NO: 8632 - protein, 9 aa, Artificial Sequence
  Description of Artificial Sequence: Synthetic peptide
RVIEIIQRA

SEQ ID NO: 8633 - protein, 9 aa, Artificial Sequence
  Description of Artificial Sequence: Synthetic peptide
YSTQIDPGL

SEQ ID NO: 8634 - protein, 9 aa, Artificial Sequence
  Description of Artificial Sequence: Synthetic peptide
AVLSLVNRV

SEQ ID NO: 8635 - protein, 9 aa, Artificial Sequence
  Description of Artificial Sequence: Synthetic peptide
SAVSLFNTI

SEQ ID NO: 8636 - protein, 9 aa, Artificial Sequence
  Description of Artificial Sequence: Synthetic peptide
VVAKEIVAC

SEQ ID NO: 8637 - protein, 9 aa, Artificial Sequence
  Description of Artificial Sequence: Synthetic peptide
IQDKSDIKV

SEQ ID NO: 8638 - protein, 9 aa, Artificial Sequence
  Description of Artificial Sequence: Synthetic peptide
GQTFFTAEV

SEQ ID NO: 8639 - protein, 10 aa, Artificial Sequence
  Description of Artificial Sequence: Synthetic peptide
KVVQIEPLGV

SEQ ID NO: 8640 - protein, 11 aa, Artificial Sequence
  Description of Artificial Sequence: Synthetic peptide
TQVDPGLADQL

SEQ ID NO: 8641 - protein, 9 aa, Artificial Sequence
  Description of Artificial Sequence: Synthetic peptide
SQIYSGIKV

SEQ ID NO: 8642 - protein, 11 aa, Artificial Sequence
  Description of Artificial Sequence: Synthetic peptide
VVIQDNSEIKV

SEQ ID NO: 8643 - protein, 9 aa, Artificial Sequence
  Description of Artificial Sequence: Synthetic peptide
GGIGGFIKV

SEQ ID NO: 8644 - protein, 10 aa, Artificial Sequence
  Description of Artificial Sequence: Synthetic peptide
GVVESMNNQL

SEQ ID NO: 8645 - protein, 9 aa, Artificial Sequence
  Description of Artificial Sequence: Synthetic peptide
KVIGDIRQA

SEQ ID NO: 8646 - protein, 9 aa, Artificial Sequence
  Description of Artificial Sequence: Synthetic peptide
SQIYPGIKV

SEQ ID NO: 8647 - protein, 9 aa, Artificial Sequence
  Description of Artificial Sequence: Synthetic peptide
IQDHSDIKV

SEQ ID NO: 8648 - protein, 9 aa, Artificial Sequence
  Description of Artificial Sequence: Synthetic peptide
VVSQIIEQL

SEQ ID NO: 8649 - protein, 9 aa, Artificial Sequence
  Description of Artificial Sequence: Synthetic peptide
IITDSQYAL

SEQ ID NO: 8650 - protein, 10 aa, Artificial Sequence
  Description of Artificial Sequence: Synthetic peptide
TVLDVGDAYF

SEQ ID NO: 8651 - protein, 9 aa, Artificial Sequence
  Description of Artificial Sequence: Synthetic peptide
GQALFTTKV

SEQ ID NO: 8652 - protein, 11 aa, Artificial Sequence
  Description of Artificial Sequence: Synthetic peptide
TQIDPGLADQL

SEQ ID NO: 8653 - protein, 9 aa, Artificial Sequence
  Description of Artificial Sequence: Synthetic peptide
MIIGGLIGL

SEQ ID NO: 8654 - protein, 9 aa, Artificial Sequence
  Description of Artificial Sequence: Synthetic peptide
VLAEAMSQA

SEQ ID NO: 8655 - protein, 9 aa, Artificial Sequence
  Description of Artificial Sequence: Synthetic peptide
GAASVTLTV

SEQ ID NO: 8656 - protein, 9 aa, Artificial Sequence
  Description of Artificial Sequence: Synthetic peptide
VVIQDNSEI

SEQ ID NO: 8657 - protein, 9 aa, Artificial Sequence
  Description of Artificial Sequence: Synthetic peptide
VQLNETVKI

SEQ ID NO: 8658 - protein, 9 aa, Artificial Sequence
  Description of Artificial Sequence: Synthetic peptide
NIIGNIRQA

SEQ ID NO: 8659 - protein, 9 aa, Artificial Sequence
  Description of Artificial Sequence: Synthetic peptide
GQLDAWEKI

SEQ ID NO: 8660 - protein, 10 aa, Artificial Sequence
  Description of Artificial Sequence: Synthetic peptide
KVVKIEPLGV

SEQ ID NO: 8661 - protein, 9 aa, Artificial Sequence
  Description of Artificial Sequence: Synthetic peptide
AVAEGTDRV

SEQ ID NO: 8662 - protein, 9 aa, Artificial Sequence
  Description of Artificial Sequence: Synthetic peptide
QLTEAVQKI

SEQ ID NO: 8663 - protein, 9 aa, Artificial Sequence
  Description of Artificial Sequence: Synthetic peptide
YQSNPPPSL

SEQ ID NO: 8664 - protein, 9 aa, Artificial Sequence
  Description of Artificial Sequence: Synthetic peptide
TVSFNLPQI

SEQ ID NO: 8665 - protein, 9 aa, Artificial Sequence
  Description of Artificial Sequence: Synthetic peptide
ASDFNLPSV

SEQ ID NO: 8666 - protein, 9 aa, Artificial Sequence
  Description of Artificial Sequence: Synthetic peptide
RIIEIIQRA

SEQ ID NO: 8667 - protein, 11 aa, Artificial Sequence
  Description of Artificial Sequence: Synthetic peptide
VVIQDHSDIKV

SEQ ID NO: 8668 - protein, 9 aa, Artificial Sequence
  Description of Artificial Sequence: Synthetic peptide
GTNTTDPRL

SEQ ID NO: 8669 - protein, 9 aa, Artificial Sequence
  Description of Artificial Sequence: Synthetic peptide
YQLEKEPIV

SEQ ID NO: 8670 - protein, 9 aa, Artificial Sequence
  Description of Artificial Sequence: Synthetic peptide
AALDLSHFL

SEQ ID NO: 8671 - protein, 9 aa, Artificial Sequence
  Description of Artificial Sequence: Synthetic peptide
QLAEAVQRI

SEQ ID NO: 8672 - protein, 9 aa, Artificial Sequence
  Description of Artificial Sequence: Synthetic peptide
SLDDIWQNM

SEQ ID NO: 8673 - protein, 9 aa, Artificial Sequence
  Description of Artificial Sequence: Synthetic peptide
SLDDIWNNM

SEQ ID NO: 8674 - protein, 9 aa, Artificial Sequence
  Description of Artificial Sequence: Synthetic peptide
VLDNVTENF

SEQ ID NO: 8675 - protein, 9 aa, Artificial Sequence
  Description of Artificial Sequence: Synthetic peptide
SVDEIWNNM

SEQ ID NO: 8676 - protein, 9 aa, Artificial Sequence
  Description of Artificial Sequence: Synthetic peptide
YVDRFYKTL

SEQ ID NO: 8677 - protein, 9 aa, Artificial Sequence
  Description of Artificial Sequence: Synthetic peptide
AVLSVVNRV

SEQ ID NO: 8678 - protein, 9 aa, Artificial Sequence
  Description of Artificial Sequence: Synthetic peptide
ILKEPVHGV

SEQ ID NO: 8679 - protein, 9 aa, Artificial Sequence
  Description of Artificial Sequence: Synthetic peptide
KIDWLIDRI

SEQ ID NO: 8680 - protein, 9 aa, Artificial Sequence
  Description of Artificial Sequence: Synthetic peptide
AVLSLVNRV

SEQ ID NO: 8681 - protein, 9 aa, Artificial Sequence
  Description of Artificial Sequence: Synthetic peptide
FSPEVIPMF

SEQ ID NO: 8682 - protein, 9 aa, Artificial Sequence
  Description of Artificial Sequence: Synthetic peptide
IIDIIASDL

SEQ ID NO: 8683 - protein, 10 aa, Artificial Sequence
  Description of Artificial Sequence: Synthetic peptide
TLWQRPVVTV

SEQ ID NO: 8684 - protein, 9 aa, Artificial Sequence
  Description of Artificial Sequence: Synthetic peptide
LIWDDLRNL

SEQ ID NO: 8685 - protein, 9 aa, Artificial Sequence
  Description of Artificial Sequence: Synthetic peptide
TVFSLVNRV

SEQ ID NO: 8686 - protein, 9 aa, Artificial Sequence
  Description of Artificial Sequence: Synthetic peptide
AADNLWVTV

SEQ ID NO: 8687 - protein, 10 aa, Artificial Sequence
  Description of Artificial Sequence: Synthetic peptide
KLPEKESWTV

SEQ ID NO: 8688 - protein, 9 aa, Artificial Sequence
  Description of Artificial Sequence: Synthetic peptide
HLEGKVILV

SEQ ID NO: 8689 - protein, 10 aa, Artificial Sequence
  Description of Artificial Sequence: Synthetic peptide
SLFDAIAIAV

SEQ ID NO: 8690 - protein, 9 aa, Artificial Sequence
  Description of Artificial Sequence: Synthetic peptide
KVIGDIRQA

SEQ ID NO: 8691 - protein, 9 aa, Artificial Sequence
  Description of Artificial Sequence: Synthetic peptide
RVIEIIQRA

SEQ ID NO: 8692 - protein, 9 aa, Artificial Sequence
  Description of Artificial Sequence: Synthetic peptide
VVSQIIEQL

SEQ ID NO: 8693 - protein, 10 aa, Artificial Sequence
  Description of Artificial Sequence: Synthetic peptide
KVVRIEPIGV

SEQ ID NO: 8694 - protein, 9 aa, Artificial Sequence
  Description of Artificial Sequence: Synthetic peptide
VVAKEIVAC

SEQ ID NO: 8695 - protein, 10 aa, Artificial Sequence
  Description of Artificial Sequence: Synthetic peptide
KVVKIEPLGV

SEQ ID NO: 8696 - protein, 10 aa, Artificial Sequence
  Description of Artificial Sequence: Synthetic peptide
KVVQIEPLGV

SEQ ID NO: 8697 - protein, 9 aa, Artificial Sequence
  Description of Artificial Sequence: Synthetic peptide
AVLSVVNRV

SEQ ID NO: 8698 - protein, 10 aa, Artificial Sequence
  Description of Artificial Sequence: Synthetic peptide
KTLQQVATKL

SEQ ID NO: 8699 - protein, 10 aa, Artificial Sequence
  Description of Artificial Sequence: Synthetic peptide
GVVESMNNQL

SEQ ID NO: 8700 - protein, 9 aa, Artificial Sequence
  Description of Artificial Sequence: Synthetic peptide
LVSQIIEQL

SEQ ID NO: 8701 - protein, 9 aa, Artificial Sequence
  Description of Artificial Sequence: Synthetic peptide
WTVNDIQKL

SEQ ID NO: 8702 - protein, 9 aa, Artificial Sequence
  Description of Artificial Sequence: Synthetic peptide
RIIEIIQRA

SEQ ID NO: 8703 - protein, 9 aa, Artificial Sequence
  Description of Artificial Sequence: Synthetic peptide
LEKEPIVGA

SEQ ID NO: 8704 - protein, 9 aa, Artificial Sequence
  Description of Artificial Sequence: Synthetic peptide
AIIRILQQL

SEQ ID NO: 8705 - protein, 10 aa, Artificial Sequence
  Description of Artificial Sequence: Synthetic peptide
RELPSEQTRA

SEQ ID NO: 8706 - protein, 9 aa, Artificial Sequence
  Description of Artificial Sequence: Synthetic peptide
VLAEAMSQA

SEQ ID NO: 8707 - protein, 9 aa, Artificial Sequence
  Description of Artificial Sequence: Synthetic peptide
STKEALDKI

SEQ ID NO: 8708 - protein, 10 aa, Artificial Sequence
  Description of Artificial Sequence: Synthetic peptide
KTLQQVAEKL

SEQ ID NO: 8709 - protein, 10 aa, Artificial Sequence
  Description of Artificial Sequence: Synthetic peptide
KSFDTEAHNI

SEQ ID NO: 8710 - protein, 9 aa, Artificial Sequence
  Description of Artificial Sequence: Synthetic peptide
KIKPPLPSV

SEQ ID NO: 8711 - protein, 9 aa, Artificial Sequence
  Description of Artificial Sequence: Synthetic peptide
SQATAGMNA

SEQ ID NO: 8712 - protein, 9 aa, Artificial Sequence
  Description of Artificial Sequence: Synthetic peptide
TVFSLVNRV

SEQ ID NO: 8713 - protein, 9 aa, Artificial Sequence
  Description of Artificial Sequence: Synthetic peptide
MIIGGLIGL

SEQ ID NO: 8714 - protein, 9 aa, Artificial Sequence
  Description of Artificial Sequence: Synthetic peptide
LEKEPIIGA

SEQ ID NO: 8715 - protein, 10 aa, Artificial Sequence
  Description of Artificial Sequence: Synthetic peptide
RTPIGLGQSL

SEQ ID NO: 8716 - protein, 11 aa, Artificial Sequence
  Description of Artificial Sequence: Synthetic peptide
VVIQDNSDIKV

SEQ ID NO: 8717 - protein, 9 aa, Artificial Sequence
  Description of Artificial Sequence: Synthetic peptide
KVVSLTDTT

SEQ ID NO: 8718 - protein, 9 aa, Artificial Sequence
  Description of Artificial Sequence: Synthetic peptide
KVASTKEAL

SEQ ID NO: 8719 - protein, 9 aa, Artificial Sequence
  Description of Artificial Sequence: Synthetic peptide
GTAGSTMGA

SEQ ID NO: 8720 - protein, 10 aa, Artificial Sequence
  Description of Artificial Sequence: Synthetic peptide
KQIKPPLPSV

SEQ ID NO: 8721 - protein, 10 aa, Artificial Sequence
  Description of Artificial Sequence: Synthetic peptide
RVLAEAMSQA

SEQ ID NO: 8722 - protein, 9 aa, Artificial Sequence
  Description of Artificial Sequence: Synthetic peptide
IEVKDTKEA

SEQ ID NO: 8723 - protein, 9 aa, Artificial Sequence
  Description of Artificial Sequence: Synthetic peptide
IVQQQNNLL

SEQ ID NO: 8724 - protein, 10 aa, Artificial Sequence
  Description of Artificial Sequence: Synthetic peptide
KVVKLEPIGL

SEQ ID NO: 8725 - protein, 9 aa, Artificial Sequence
  Description of Artificial Sequence: Synthetic peptide
KVVSFTNTT

SEQ ID NO: 8726 - protein, 10 aa, Artificial Sequence
  Description of Artificial Sequence: Synthetic peptide
SQATAGMNAA

SEQ ID NO: 8727 - protein, 9 aa, Artificial Sequence
  Description of Artificial Sequence: Synthetic peptide
ILKEPVHGV

SEQ ID NO: 8728 - protein, 9 aa, Artificial Sequence
  Description of Artificial Sequence: Synthetic peptide
RTNPAADGV

SEQ ID NO: 8729 - protein, 10 aa, Artificial Sequence
  Description of Artificial Sequence: Synthetic peptide
KTIIVQLNET

SEQ ID NO: 8730 - protein, 9 aa, Artificial Sequence
  Description of Artificial Sequence: Synthetic peptide
WTVNDIQNL

SEQ ID NO: 8731 - protein, 9 aa, Artificial Sequence
  Description of Artificial Sequence: Synthetic peptide
YQSNPPPSL

SEQ ID NO: 8732 - protein, 9 aa, Artificial Sequence
  Description of Artificial Sequence: Synthetic peptide
VVKIEPLGV

SEQ ID NO: 8733 - protein, 9 aa, Artificial Sequence
  Description of Artificial Sequence: Synthetic peptide
KVVPLTDTT

SEQ ID NO: 8734 - protein, 9 aa, Artificial Sequence
  Description of Artificial Sequence: Synthetic peptide
QIYSGIKVK

SEQ ID NO: 8735 - protein, 9 aa, Artificial Sequence
  Description of Artificial Sequence: Synthetic peptide
AIYAPPIER

SEQ ID NO: 8736 - protein, 9 aa, Artificial Sequence
  Description of Artificial Sequence: Synthetic peptide
SANNISIVK

SEQ ID NO: 8737 - protein, 9 aa, Artificial Sequence
  Description of Artificial Sequence: Synthetic peptide
TTDPRLIEK

SEQ ID NO: 8738 - protein, 9 aa, Artificial Sequence
  Description of Artificial Sequence: Synthetic peptide
AIFQSSMTK

SEQ ID NO: 8739 - protein, 9 aa, Artificial Sequence
  Description of Artificial Sequence: Synthetic peptide
KTLQQVATK

SEQ ID NO: 8740 - protein, 10 aa, Artificial Sequence
  Description of Artificial Sequence: Synthetic peptide
ATKLGDLLNK

SEQ ID NO: 8741 - protein, 9 aa, Artificial Sequence
  Description of Artificial Sequence: Synthetic peptide
AVYLSQFLK

SEQ ID NO: 8742 - protein, 9 aa, Artificial Sequence
  Description of Artificial Sequence: Synthetic peptide
SVTTAMMQR

SEQ ID NO: 8743 - protein, 10 aa, Artificial Sequence
  Description of Artificial Sequence: Synthetic peptide
ALTEVIPLTK

SEQ ID NO: 8744 - protein, 9 aa, Artificial Sequence
  Description of Artificial Sequence: Synthetic peptide
KTLHQVAQK

SEQ ID NO: 8745 - protein, 9 aa, Artificial Sequence
  Description of Artificial Sequence: Synthetic peptide
QIYPGIKVR

SEQ ID NO: 8746 - protein, 11 aa, Artificial Sequence
  Description of Artificial Sequence: Synthetic peptide
IGPGQALFTTK

SEQ ID NO: 8747 - protein, 9 aa, Artificial Sequence
  Description of Artificial Sequence: Synthetic peptide
ELYPSASLK

SEQ ID NO: 8748 - protein, 10 aa, Artificial Sequence
  Description of Artificial Sequence: Synthetic peptide
TVYYGVPVWK

SEQ ID NO: 8749 - protein, 8 aa, Artificial Sequence
  Description of Artificial Sequence: Synthetic peptide
KLGTLLNK

SEQ ID NO: 8750 - protein, 9 aa, Artificial Sequence
  Description of Artificial Sequence: Synthetic peptide
KTLQQVAEK

SEQ ID NO: 8751 - protein, 11 aa, Artificial Sequence
  Description of Artificial Sequence: Synthetic peptide
TVNDIQKLVGK

SEQ ID NO: 8752 - protein, 10 aa, Artificial Sequence
  Description of Artificial Sequence: Synthetic peptide
QVPERPVTYK

SEQ ID NO: 8753 - protein, 10 aa, Artificial Sequence
  Description of Artificial Sequence: Synthetic peptide
SSANNISIVK

SEQ ID NO: 8754 - protein, 10 aa, Artificial Sequence
  Description of Artificial Sequence: Synthetic peptide
GQAHQVPIPK

SEQ ID NO: 8755 - protein, 9 aa, Artificial Sequence
  Description of Artificial Sequence: Synthetic peptide
ALTALIAPK

SEQ ID NO: 8756 - protein, 11 aa, Artificial Sequence
  Description of Artificial Sequence: Synthetic peptide
KIKPPLPSVGK

SEQ ID NO: 8757 - protein, 10 aa, Artificial Sequence
  Description of Artificial Sequence: Synthetic peptide
SLFGNDPLSQ

SEQ ID NO: 8758 - protein, 10 aa, Artificial Sequence
  Description of Artificial Sequence: Synthetic peptide
ALTEIIPLTK

SEQ ID NO: 8759 - protein, 9 aa, Artificial Sequence
  Description of Artificial Sequence: Synthetic peptide
KTLQQVARK

SEQ ID NO: 8760 - protein, 10 aa, Artificial Sequence
  Description of Artificial Sequence: Synthetic peptide
LLNQTTIIFK

SEQ ID NO: 8761 - protein, 9 aa, Artificial Sequence
  Description of Artificial Sequence: Synthetic peptide
SVITQACPK

SEQ ID NO: 8762 - protein, 11 aa, Artificial Sequence
  Description of Artificial Sequence: Synthetic peptide
TVNDIQKLVGK

SEQ ID NO: 8763 - protein, 9 aa, Artificial Sequence
  Description of Artificial Sequence: Synthetic peptide
SANNISIVK

SEQ ID NO: 8764 - protein, 10 aa, Artificial Sequence
  Description of Artificial Sequence: Synthetic peptide
TVQPITLPEK

SEQ ID NO: 8765 - protein, 9 aa, Artificial Sequence
  Description of Artificial Sequence: Synthetic peptide
QIYSGIKVK

SEQ ID NO: 8766 - protein, 9 aa, Artificial Sequence
  Description of Artificial Sequence: Synthetic peptide
KTLQQVATK

SEQ ID NO: 8767 - protein, 10 aa, Artificial Sequence
  Description of Artificial Sequence: Synthetic peptide
TVQSIKLPEK

SEQ ID NO: 8768 - protein, 9 aa, Artificial Sequence
  Description of Artificial Sequence: Synthetic peptide
AIYAPPIER

SEQ ID NO: 8769 - protein, 10 aa, Artificial Sequence
  Description of Artificial Sequence: Synthetic peptide
SSANNISIVK

SEQ ID NO: 8770 - protein, 10 aa, Artificial Sequence
  Description of Artificial Sequence: Synthetic peptide
TVQPIKLPEK

SEQ ID NO: 8771 - protein, 10 aa, Artificial Sequence
  Description of Artificial Sequence: Synthetic peptide
TVQPIHLPEK

SEQ ID NO: 8772 - protein, 9 aa, Artificial Sequence
  Description of Artificial Sequence: Synthetic peptide
KTLQQVAEK

SEQ ID NO: 8773 - protein, 10 aa, Artificial Sequence
  Description of Artificial Sequence: Synthetic peptide
SANNISIVKK

SEQ ID NO: 8774 - protein, 9 aa, Artificial Sequence
  Description of Artificial Sequence: Synthetic peptide
AIFQSSMTK

SEQ ID NO: 8775 - protein, 10 aa, Artificial Sequence
  Description of Artificial Sequence: Synthetic peptide
ILGQLQPALK

SEQ ID NO: 8776 - protein, 9 aa, Artificial Sequence
  Description of Artificial Sequence: Synthetic peptide
ANNISIVKK

SEQ ID NO: 8777 - protein, 10 aa, Artificial Sequence
  Description of Artificial Sequence: Synthetic peptide
GSNFTSAAVK

SEQ ID NO: 8778 - protein, 9 aa, Artificial Sequence
  Description of Artificial Sequence: Synthetic peptide
KTLHQVAQK

SEQ ID NO: 8779 - protein, 9 aa, Artificial Sequence
  Description of Artificial Sequence: Synthetic peptide
AVDLSHFLK

SEQ ID NO: 8780 - protein, 11 aa, Artificial Sequence
  Description of Artificial Sequence: Synthetic peptide
VVSLTDTTNQK

SEQ ID NO: 8781 - protein, 9 aa, Artificial Sequence
  Description of Artificial Sequence: Synthetic peptide
SFNTTTILK

SEQ ID NO: 8782 - protein, 10 aa, Artificial Sequence
  Description of Artificial Sequence: Synthetic peptide
GSNFTSATVK

SEQ ID NO: 8783 - protein, 10 aa, Artificial Sequence
  Description of Artificial Sequence: Synthetic peptide
VVESMNNQLK

SEQ ID NO: 8784 - protein, 10 aa, Artificial Sequence
  Description of Artificial Sequence: Synthetic peptide
ALTEVIPLTK

SEQ ID NO: 8785 - protein, 9 aa, Artificial Sequence
  Description of Artificial Sequence: Synthetic peptide
SVITQACPK

SEQ ID NO: 8786 - protein, 9 aa, Artificial Sequence
  Description of Artificial Sequence: Synthetic peptide
APAGFAILK

SEQ ID NO: 8787 - protein, 9 aa, Artificial Sequence
  Description of Artificial Sequence: Synthetic peptide
TTDPRLIEK

SEQ ID NO: 8788 - protein, 10 aa, Artificial Sequence
  Description of Artificial Sequence: Synthetic peptide
ALTEIIPLTK

SEQ ID NO: 8789 - protein, 9 aa, Artificial Sequence
  Description of Artificial Sequence: Synthetic peptide
ALTALIAPK

SEQ ID NO: 8790 - protein, 11 aa, Artificial Sequence
  Description of Artificial Sequence: Synthetic peptide
VVSFTNTTNQK

SEQ ID NO: 8791 - protein, 10 aa, Artificial Sequence
  Description of Artificial Sequence: Synthetic peptide
KLDVVPIDKK

SEQ ID NO: 8792 - protein, 11 aa, Artificial Sequence
  Description of Artificial Sequence: Synthetic peptide
QSQGVVESMNK

SEQ ID NO: 8793 - protein, 11 aa, Artificial Sequence
  Description of Artificial Sequence: Synthetic peptide
KALTEVIPLTK

SEQ ID NO: 8794 - protein, 9 aa, Artificial Sequence
  Description of Artificial Sequence: Synthetic peptide
AVYLSQFLK

SEQ ID NO: 8795 - protein, 9 aa, Artificial Sequence
  Description of Artificial Sequence: Synthetic peptide
KTLQQVARK

SEQ ID NO: 8796 - protein, 9 aa, Artificial Sequence
  Description of Artificial Sequence: Synthetic peptide
SLTDTTNQK

SEQ ID NO: 8797 - protein, 11 aa, Artificial Sequence
  Description of Artificial Sequence: Synthetic peptide
GMEDPERQVLK

SEQ ID NO: 8798 - protein, 9 aa, Artificial Sequence
  Description of Artificial Sequence: Synthetic peptide
IIATDIQTK

SEQ ID NO: 8799 - protein, 9 aa, Artificial Sequence
  Description of Artificial Sequence: Synthetic peptide
SFNVTTVLK

SEQ ID NO: 8800 - protein, 11 aa, Artificial Sequence
  Description of Artificial Sequence: Synthetic peptide
ASQIYSGIKVK

SEQ ID NO: 8801 - protein, 10 aa, Artificial Sequence
  Description of Artificial Sequence: Synthetic peptide
ATESIVIWGK

SEQ ID NO: 8802 - protein, 9 aa, Artificial Sequence
  Description of Artificial Sequence: Synthetic peptide
SVTTAMMQR

SEQ ID NO: 8803 - protein, 9 aa, Artificial Sequence
  Description of Artificial Sequence: Synthetic peptide
KLDVVPIDK

SEQ ID NO: 8804 - protein, 8 aa, Artificial Sequence
  Description of Artificial Sequence: Synthetic peptide
ANNISIVK

SEQ ID NO: 8805 - protein, 9 aa, Artificial Sequence
  Description of Artificial Sequence: Synthetic peptide
SNFTSATVK

SEQ ID NO: 8806 - protein, 9 aa, Artificial Sequence
  Description of Artificial Sequence: Synthetic peptide
KQLTEAVQK

SEQ ID NO: 8807 - protein, 11 aa, Artificial Sequence
  Description of Artificial Sequence: Synthetic peptide
ATDIQTKELQK

SEQ ID NO: 8808 - protein, 11 aa, Artificial Sequence
  Description of Artificial Sequence: Synthetic peptide
SSANNISIVKK

SEQ ID NO: 8809 - protein, 10 aa, Artificial Sequence
  Description of Artificial Sequence: Synthetic peptide
VVESMNKELK

SEQ ID NO: 8810 - protein, 9 aa, Artificial Sequence
  Description of Artificial Sequence: Synthetic peptide
SANNISIVK

SEQ ID NO: 8811 - protein, 10 aa, Artificial Sequence
  Description of Artificial Sequence: Synthetic peptide
SSANNISIVK

SEQ ID NO: 8812 - protein, 11 aa, Artificial Sequence
  Description of Artificial Sequence: Synthetic peptide
SSANNISIVKK

SEQ ID NO: 8813 - protein, 10 aa, Artificial Sequence
  Description of Artificial Sequence: Synthetic peptide
SANNISIVKK

SEQ ID NO: 8814 - protein, 9 aa, Artificial Sequence
  Description of Artificial Sequence: Synthetic peptide
QIYSGIKVK

SEQ ID NO: 8815 - protein, 11 aa, Artificial Sequence
  Description of Artificial Sequence: Synthetic peptide
GVVESMNNQLK

SEQ ID NO: 8816 - protein, 9 aa, Artificial Sequence
  Description of Artificial Sequence: Synthetic peptide
AIYAPPIER

SEQ ID NO: 8817 - protein, 9 aa, Artificial Sequence
  Description of Artificial Sequence: Synthetic peptide
SVITQACPK

SEQ ID NO: 8818 - protein, 9 aa, Artificial Sequence
  Description of Artificial Sequence: Synthetic peptide
SVTTAMMQR

SEQ ID NO: 8819 - protein, 10 aa, Artificial Sequence
  Description of Artificial Sequence: Synthetic peptide
TVQPITLPEK

SEQ ID NO: 8820 - protein, 9 aa, Artificial Sequence
  Description of Artificial Sequence: Synthetic peptide
TTDPRLIEK

SEQ ID NO: 8821 - protein, 11 aa, Artificial Sequence
  Description of Artificial Sequence: Synthetic peptide
TVNDIQKLVGK

SEQ ID NO: 8822 - protein, 9 aa, Artificial Sequence
  Description of Artificial Sequence: Synthetic peptide
APAGFAILK

SEQ ID NO: 8823 - protein, 10 aa, Artificial Sequence
  Description of Artificial Sequence: Synthetic peptide
TVQSIKLPEK

SEQ ID NO: 8824 - protein, 9 aa, Artificial Sequence
  Description of Artificial Sequence: Synthetic peptide
AVDLSHFLK

SEQ ID NO: 8825 - protein, 10 aa, Artificial Sequence
  Description of Artificial Sequence: Synthetic peptide
GSNFTSATVK

SEQ ID NO: 8826 - protein, 10 aa, Artificial Sequence
  Description of Artificial Sequence: Synthetic peptide
ATKLGDLLNK

SEQ ID NO: 8827 - protein, 9 aa, Artificial Sequence
  Description of Artificial Sequence: Synthetic peptide
KTLQQVATK

SEQ ID NO: 8828 - protein, 10 aa, Artificial Sequence
  Description of Artificial Sequence: Synthetic peptide
TVQPIKLPEK

SEQ ID NO: 8829 - protein, 10 aa, Artificial Sequence
  Description of Artificial Sequence: Synthetic peptide
TVQPIHLPEK

SEQ ID NO: 8830 - protein, 9 aa, Artificial Sequence
  Description of Artificial Sequence: Synthetic peptide
ANNISIVKK

SEQ ID NO: 8831 - protein, 10 aa, Artificial Sequence
  Description of Artificial Sequence: Synthetic peptide
GQAHQVPIPK

SEQ ID NO: 8832 - protein, 10 aa, Artificial Sequence
  Description of Artificial Sequence: Synthetic peptide
GSNFTSAAVK

SEQ ID NO: 8833 - protein, 9 aa, Artificial Sequence
  Description of Artificial Sequence: Synthetic peptide
AVYLSQFLK

SEQ ID NO: 8834 - protein, 11 aa, Artificial Sequence
  Description of Artificial Sequence: Synthetic peptide
ATDIQTKELQK

SEQ ID NO: 8835 - protein, 9 aa, Artificial Sequence
  Description of Artificial Sequence: Synthetic peptide
KTLQQVAEK

SEQ ID NO: 8836 - protein, 9 aa, Artificial Sequence
  Description of Artificial Sequence: Synthetic peptide
AIFQSSMTK

SEQ ID NO: 8837 - protein, 11 aa, Artificial Sequence
  Description of Artificial Sequence: Synthetic peptide
VVPLTDTTNQK

SEQ ID NO: 8838 - protein, 10 aa, Artificial Sequence
  Description of Artificial Sequence: Synthetic peptide
ATESIVIWGK

SEQ ID NO: 8839 - protein, 11 aa, Artificial Sequence
  Description of Artificial Sequence: Synthetic peptide
VVSLTDTTNQK

SEQ ID NO: 8840 - protein, 10 aa, Artificial Sequence
  Description of Artificial Sequence: Synthetic peptide
CSFNTTTILK

SEQ ID NO: 8841 - protein, 9 aa, Artificial Sequence
  Description of Artificial Sequence: Synthetic peptide
KTLHQVAQK

SEQ ID NO: 8842 - protein, 9 aa, Artificial Sequence
  Description of Artificial Sequence: Synthetic peptide
QIIEQLIKK

SEQ ID NO: 8843 - protein, 9 aa, Artificial Sequence
  Description of Artificial Sequence: Synthetic peptide
SAIKQACPK

SEQ ID NO: 8844 - protein, 9 aa, Artificial Sequence
  Description of Artificial Sequence: Synthetic peptide
SAITQACPK

SEQ ID NO: 8845 - protein, 10 aa, Artificial Sequence
  Description of Artificial Sequence: Synthetic peptide
AALDLSHFLK

SEQ ID NO: 8846 - protein, 11 aa, Artificial Sequence
  Description of Artificial Sequence: Synthetic peptide
FTAEVTGDIRK

SEQ ID NO: 8847 - protein, 9 aa, Artificial Sequence
  Description of Artificial Sequence: Synthetic peptide
SFNTTTILK

SEQ ID NO: 8848 - protein, 9 aa, Artificial Sequence
  Description of Artificial Sequence: Synthetic peptide
SNFTSATVK

SEQ ID NO: 8849 - protein, 11 aa, Artificial Sequence
  Description of Artificial Sequence: Synthetic peptide
GVVESMNRELK

SEQ ID NO: 8850 - protein, 11 aa, Artificial Sequence
  Description of Artificial Sequence: Synthetic peptide
GVVESMNKELK

SEQ ID NO: 8851 - protein, 9 aa, Artificial Sequence
  Description of Artificial Sequence: Synthetic peptide
ATNIIGNIR

SEQ ID NO: 8852 - protein, 10 aa, Artificial Sequence
  Description of Artificial Sequence: Synthetic peptide
SVLSGGKLDK

SEQ ID NO: 8853 - protein, 9 aa, Artificial Sequence
  Description of Artificial Sequence: Synthetic peptide
ALTALIAPK

SEQ ID NO: 8854 - protein, 9 aa, Artificial Sequence
  Description of Artificial Sequence: Synthetic peptide
KTLQQVARK

SEQ ID NO: 8855 - protein, 9 aa, Artificial Sequence
  Description of Artificial Sequence: Synthetic peptide
QIYPGIKVR

SEQ ID NO: 8856 - protein, 9 aa, Artificial Sequence
  Description of Artificial Sequence: Synthetic peptide
SVTLTVQAR

SEQ ID NO: 8857 - protein, 10 aa, Artificial Sequence
  Description of Artificial Sequence: Synthetic peptide
GTLLNKTIIK

SEQ ID NO: 8858 - protein, 8 aa, Artificial Sequence
  Description of Artificial Sequence: Synthetic peptide
FTDSAIRK

SEQ ID NO: 8859 - protein, 10 aa, Artificial Sequence
  Description of Artificial Sequence: Synthetic peptide
ALTEVIPLTK

SEQ ID NO: 8860 - protein, 9 aa, Artificial Sequence
  Description of Artificial Sequence: Synthetic peptide
YVNTPPLVK

SEQ ID NO: 8861 - protein, 10 aa, Artificial Sequence
  Description of Artificial Sequence: Synthetic peptide
VSFTNTTNQK

SEQ ID NO: 8862 - protein, 10 aa, Artificial Sequence
  Description of Artificial Sequence: Synthetic peptide
ATNIIGNIRQ

SEQ ID NO: 8863 - protein, 9 aa, Artificial Sequence
  Description of Artificial Sequence: Synthetic peptide
NYTGVIYSL

SEQ ID NO: 8864 - protein, 9 aa, Artificial Sequence
  Description of Artificial Sequence: Synthetic peptide
NYTELVYSL

SEQ ID NO: 8865 - protein, 9 aa, Artificial Sequence
  Description of Artificial Sequence: Synthetic peptide
NYTGLIYSL

SEQ ID NO: 8866 - protein, 9 aa, Artificial Sequence
  Description of Artificial Sequence: Synthetic peptide
SYLKDQQLL

SEQ ID NO: 8867 - protein, 9 aa, Artificial Sequence
  Description of Artificial Sequence: Synthetic peptide
IYQEPFKNL

SEQ ID NO: 8868 - protein, 9 aa, Artificial Sequence
  Description of Artificial Sequence: Synthetic peptide
IYQEQYKNL

SEQ ID NO: 8869 - protein, 9 aa, Artificial Sequence
  Description of Artificial Sequence: Synthetic peptide
MYAPPIEGF

SEQ ID NO: 8870 - protein, 9 aa, Artificial Sequence
  Description of Artificial Sequence: Synthetic peptide
RYLKDQQLL

SEQ ID NO: 8871 - protein, 9 aa, Artificial Sequence
  Description of Artificial Sequence: Synthetic peptide
VLDNVTENF

SEQ ID NO: 8872 - protein, 9 aa, Artificial Sequence
  Description of Artificial Sequence: Synthetic peptide
SYLKDQQLL

SEQ ID NO: 8873 - protein, 9 aa, Artificial Sequence
  Description of Artificial Sequence: Synthetic peptide
NYTELVYSL

SEQ ID NO: 8874 - protein, 9 aa, Artificial Sequence
  Description of Artificial Sequence: Synthetic peptide
IYQEQYKNL

SEQ ID NO: 8875 - protein, 9 aa, Artificial Sequence
  Description of Artificial Sequence: Synthetic peptide
NYTGVIYSL

SEQ ID NO: 8876 - protein, 9 aa, Artificial Sequence
  Description of Artificial Sequence: Synthetic peptide
IYQEPFKNL

SEQ ID NO: 8877 - protein, 9 aa, Artificial Sequence
  Description of Artificial Sequence: Synthetic peptide
MYAPPIEGF

SEQ ID NO: 8878 - protein, 9 aa, Artificial Sequence
  Description of Artificial Sequence: Synthetic peptide
FYATYATNI

SEQ ID NO: 8879 - protein, 9 aa, Artificial Sequence
  Description of Artificial Sequence: Synthetic peptide
RYLKDQQLL

SEQ ID NO: 8880 - protein, 9 aa, Artificial Sequence
  Description of Artificial Sequence: Synthetic peptide
NYTGLIYSL

SEQ ID NO: 8881 - protein, 9 aa, Artificial Sequence
  Description of Artificial Sequence: Synthetic peptide
FYILDIVGI

SEQ ID NO: 8882 - protein, 11 aa, Artificial Sequence
  Description of Artificial Sequence: Synthetic peptide
IYAPPIERNIL

SEQ ID NO: 8883 - protein, 9 aa, Artificial Sequence
  Description of Artificial Sequence: Synthetic peptide
FYKLDVVKI

SEQ ID NO: 8884 - protein, 9 aa, Artificial Sequence
  Description of Artificial Sequence: Synthetic peptide
TYSAAGNLW

SEQ ID NO: 8885 - protein, 9 aa, Artificial Sequence
  Description of Artificial Sequence: Synthetic peptide
YYDPSKDLI

SEQ ID NO: 8886 - protein, 10 aa, Artificial Sequence
  Description of Artificial Sequence: Synthetic peptide
EIAERILGTY

SEQ ID NO: 8887 - protein, 10 aa, Artificial Sequence
  Description of Artificial Sequence: Synthetic peptide
ETINEEAAEW

SEQ ID NO: 8888 - protein, 10 aa, Artificial Sequence
  Description of Artificial Sequence: Synthetic peptide
DTINEEAAEW

SEQ ID NO: 8889 - protein, 10 aa, Artificial Sequence
  Description of Artificial Sequence: Synthetic peptide
EVTGDIRKAY

SEQ ID NO: 8890 - protein, 9 aa, Artificial Sequence
  Description of Artificial Sequence: Synthetic peptide
EVIPMFSAL

SEQ ID NO: 8891 - protein, 11 aa, Artificial Sequence
  Description of Artificial Sequence: Synthetic peptide
DSIGERILSTY

SEQ ID NO: 8892 - protein, 10 aa, Artificial Sequence
  Description of Artificial Sequence: Synthetic peptide
EVNIITDSQY

SEQ ID NO: 8893 - protein, 10 aa, Artificial Sequence
  Description of Artificial Sequence: Synthetic peptide
EVQKQGDGQW

SEQ ID NO: 8894 - protein, 9 aa, Artificial Sequence
  Description of Artificial Sequence: Synthetic peptide
DIAGTTSTL

SEQ ID NO: 8895 - protein, 9 aa, Artificial Sequence
  Description of Artificial Sequence: Synthetic peptide
NVSENFNMW

SEQ ID NO: 8896 - protein, 11 aa, Artificial Sequence
  Description of Artificial Sequence: Synthetic peptide
SVLSGGQLDAW

SEQ ID NO: 8897 - protein, 9 aa, Artificial Sequence
  Description of Artificial Sequence: Synthetic peptide
NVTENFNMW

SEQ ID NO: 8898 - protein, 10 aa, Artificial Sequence
  Description of Artificial Sequence: Synthetic peptide
EVVSQIIEQL

SEQ ID NO: 8899 - protein, 10 aa, Artificial Sequence
  Description of Artificial Sequence: Synthetic peptide
EIQKQGHGQW

SEQ ID NO: 8900 - protein, 9 aa, Artificial Sequence
  Description of Artificial Sequence: Synthetic peptide
EVIIRSENL

SEQ ID NO: 8901 - protein, 10 aa, Artificial Sequence
  Description of Artificial Sequence: Synthetic peptide
NTSGLFNSTW

SEQ ID NO: 8902 - protein, 10 aa, Artificial Sequence
  Description of Artificial Sequence: Synthetic peptide
FTKKGLGVSY

SEQ ID NO: 8903 - protein, 10 aa, Artificial Sequence
  Description of Artificial Sequence: Synthetic peptide
EVNIVTDSQY

SEQ ID NO: 8904 - protein, 10 aa, Artificial Sequence
  Description of Artificial Sequence: Synthetic peptide
EIAERILGTY

SEQ ID NO: 8905 - protein, 10 aa, Artificial Sequence
  Description of Artificial Sequence: Synthetic peptide
EVNIITDSQY

SEQ ID NO: 8906 - protein, 11 aa, Artificial Sequence
  Description of Artificial Sequence: Synthetic peptide
DSIGERILSTY

SEQ ID NO: 8907 - protein, 10 aa, Artificial Sequence
  Description of Artificial Sequence: Synthetic peptide
EVTGDIRKAY

SEQ ID NO: 8908 - protein, 10 aa, Artificial Sequence
  Description of Artificial Sequence: Synthetic peptide
EVNIVTDSQY

SEQ ID NO: 8909 - protein, 9 aa, Artificial Sequence
  Description of Artificial Sequence: Synthetic peptide
EVIPMFSAL

SEQ ID NO: 8910 - protein, 9 aa, Artificial Sequence
  Description of Artificial Sequence: Synthetic peptide
ETKLGKAGY

SEQ ID NO: 8911 - protein, 9 aa, Artificial Sequence
  Description of Artificial Sequence: Synthetic peptide
ETPGIRYQY

SEQ ID NO: 8912 - protein, 9 aa, Artificial Sequence
  Description of Artificial Sequence: Synthetic peptide
DIVSPRCEY

SEQ ID NO: 8913 - protein, 9 aa, Artificial Sequence
  Description of Artificial Sequence: Synthetic peptide
DTKLGKAGY

SEQ ID NO: 8914 - protein, 9 aa, Artificial Sequence
  Description of Artificial Sequence: Synthetic peptide
ETRLGKAGY

SEQ ID NO: 8915 - protein, 10 aa, Artificial Sequence
  Description of Artificial Sequence: Synthetic peptide
EVIPAETGQE

SEQ ID NO: 8916 - protein, 9 aa, Artificial Sequence
  Description of Artificial Sequence: Synthetic peptide
EVTGDIRKA

SEQ ID NO: 8917 - protein, 9 aa, Artificial Sequence
  Description of Artificial Sequence: Synthetic peptide
YTPGPGTRY

SEQ ID NO: 8918 - protein, 10 aa, Artificial Sequence
  Description of Artificial Sequence: Synthetic peptide
ETFRPGGGDM

SEQ ID NO: 8919 - protein, 9 aa, Artificial Sequence
  Description of Artificial Sequence: Synthetic peptide
EVVSQIIEQ

SEQ ID NO: 8920 - protein, 10 aa, Artificial Sequence
  Description of Artificial Sequence: Synthetic peptide
EVVSQIIEQL

SEQ ID NO: 8921 - protein, 9 aa, Artificial Sequence
  Description of Artificial Sequence: Synthetic peptide
EVIPSETGQ

SEQ ID NO: 8922 - protein, 10 aa, Artificial Sequence
  Description of Artificial Sequence: Synthetic peptide
EIFRPGGGDM

SEQ ID NO: 8923 - protein, 9 aa, Artificial Sequence
  Description of Artificial Sequence: Synthetic peptide
EVIPAETGQ

SEQ ID NO: 8924 - protein, 11 aa, Artificial Sequence
  Description of Artificial Sequence: Synthetic peptide
HSIGERIISTY

SEQ ID NO: 8925 - protein, 8 aa, Artificial Sequence
  Description of Artificial Sequence: Synthetic peptide
ETVHGAYY

SEQ ID NO: 8926 - protein, 10 aa, Artificial Sequence
  Description of Artificial Sequence: Synthetic peptide
EAMSQATAGM

SEQ ID NO: 8927 - protein, 10 aa, Artificial Sequence
  Description of Artificial Sequence: Synthetic peptide
EVIPSETGQE

SEQ ID NO: 8928 - protein, 10 aa, Artificial Sequence
  Description of Artificial Sequence: Synthetic peptide
EIAERILGTY

SEQ ID NO: 8929 - protein, 9 aa, Artificial Sequence
  Description of Artificial Sequence: Synthetic peptide
EVIPMFSAL

SEQ ID NO: 8930 - protein, 10 aa, Artificial Sequence
  Description of Artificial Sequence: Synthetic peptide
EVNIITDSQY

SEQ ID NO: 8931 - protein, 10 aa, Artificial Sequence
  Description of Artificial Sequence: Synthetic peptide
EVNIVTDSQY

SEQ ID NO: 8932 - protein, 10 aa, Artificial Sequence
  Description of Artificial Sequence: Synthetic peptide
EVVSQIIEQL

SEQ ID NO: 8933 - protein, 9 aa, Artificial Sequence
  Description of Artificial Sequence: Synthetic peptide
DIAGTTSTL

SEQ ID NO: 8934 - protein, 9 aa, Artificial Sequence
  Description of Artificial Sequence: Synthetic peptide
DTKEALEKM

SEQ ID NO: 8935 - protein, 10 aa, Artificial Sequence
  Description of Artificial Sequence: Synthetic peptide
EIFRPGGGDM

SEQ ID NO: 8936 - protein, 11 aa, Artificial Sequence
  Description of Artificial Sequence: Synthetic peptide
DSIGERILSTY

SEQ ID NO: 8937 - protein, 10 aa, Artificial Sequence
  Description of Artificial Sequence: Synthetic peptide
SIGERIISTY

SEQ ID NO: 8938 - protein, 9 aa, Artificial Sequence
  Description of Artificial Sequence: Synthetic peptide
EVIPMFSAL

SEQ ID NO: 8939 - protein, 11 aa, Artificial Sequence
  Description of Artificial Sequence: Synthetic peptide
DIVGIDNSSNR

SEQ ID NO: 8940 - protein, 10 aa, Artificial Sequence
  Description of Artificial Sequence: Synthetic peptide
EAMSQATAGM

SEQ ID NO: 8941 - protein, 10 aa, Artificial Sequence
  Description of Artificial Sequence: Synthetic peptide
EIAERILGTY

SEQ ID NO: 8942 - protein, 9 aa, Artificial Sequence
  Description of Artificial Sequence: Synthetic peptide
SVTTAMMQR

SEQ ID NO: 8943 - protein, 9 aa, Artificial Sequence
  Description of Artificial Sequence: Synthetic peptide
ETVKINCTR

SEQ ID NO: 8944 - protein, 10 aa, Artificial Sequence
  Description of Artificial Sequence: Synthetic peptide
EVTGDIRKAY

SEQ ID NO: 8945 - protein, 9 aa, Artificial Sequence
  Description of Artificial Sequence: Synthetic peptide
EVTGDIRKA

SEQ ID NO: 8946 - protein, 9 aa, Artificial Sequence
  Description of Artificial Sequence: Synthetic peptide
EVIPLTAEA

SEQ ID NO: 8947 - protein, 9 aa, Artificial Sequence
  Description of Artificial Sequence: Synthetic peptide
EPIGVAPTR

SEQ ID NO: 8948 - protein, 9 aa, Artificial Sequence
  Description of Artificial Sequence: Synthetic peptide
MVHQAISPR

SEQ ID NO: 8949 - protein, 9 aa, Artificial Sequence
  Description of Artificial Sequence: Synthetic peptide
EVIIRSENL

SEQ ID NO: 8950 - protein, 9 aa, Artificial Sequence
  Description of Artificial Sequence: Synthetic peptide
DIAGTTSTL

SEQ ID NO: 8951 - protein, 10 aa, Artificial Sequence
  Description of Artificial Sequence: Synthetic peptide
EVNIITDSQY

SEQ ID NO: 8952 - protein, 10 aa, Artificial Sequence
  Description of Artificial Sequence: Synthetic peptide
DNSDIKVVPR

SEQ ID NO: 8953 - protein, 9 aa, Artificial Sequence
  Description of Artificial Sequence: Synthetic peptide
QIIKMVAGR

SEQ ID NO: 8954 - protein, 9 aa, Artificial Sequence
  Description of Artificial Sequence: Synthetic peptide
NTINITCVR

SEQ ID NO: 8955 - protein, 10 aa, Artificial Sequence
  Description of Artificial Sequence: Synthetic peptide
EVVSQIIEQL

SEQ ID NO: 8956 - protein, 11 aa, Artificial Sequence
  Description of Artificial Sequence: Synthetic peptide
DVKQLAEAVQR

SEQ ID NO: 8957 - protein, 9 aa, Artificial Sequence
  Description of Artificial Sequence: Synthetic peptide
ESVKITCAR

SEQ ID NO: 8958 - protein, 9 aa, Artificial Sequence
  Description of Artificial Sequence: Synthetic peptide
EVIPLTKEA

SEQ ID NO: 8959 - protein, 9 aa, Artificial Sequence
  Description of Artificial Sequence: Synthetic peptide
MVHQALSPR

SEQ ID NO: 8960 - protein, 9 aa, Artificial Sequence
  Description of Artificial Sequence: Synthetic peptide
LFNTVATLY

SEQ ID NO: 8961 - protein, 9 aa, Artificial Sequence
  Description of Artificial Sequence: Synthetic peptide
TVLDVGDAY

SEQ ID NO: 8962 - protein, 9 aa, Artificial Sequence
  Description of Artificial Sequence: Synthetic peptide
LYNTVATLY

SEQ ID NO: 8963 - protein, 9 aa, Artificial Sequence
  Description of Artificial Sequence: Synthetic peptide
LFNAVAVLY

SEQ ID NO: 8964 - protein, 9 aa, Artificial Sequence
  Description of Artificial Sequence: Synthetic peptide
LYNTVVTLY

SEQ ID NO: 8965 - protein, 10 aa, Artificial Sequence
  Description of Artificial Sequence: Synthetic peptide
GSSSQVSQNY

SEQ ID NO: 8966 - protein, 9 aa, Artificial Sequence
  Description of Artificial Sequence: Synthetic peptide
ITKGLGISY

SEQ ID NO: 8967 - protein, 9 aa, Artificial Sequence
  Description of Artificial Sequence: Synthetic peptide
NSSQVSQNY

SEQ ID NO: 8968 - protein, 9 aa, Artificial Sequence
  Description of Artificial Sequence: Synthetic peptide
NNSQVSQNY

SEQ ID NO: 8969 - protein, 9 aa, Artificial Sequence
  Description of Artificial Sequence: Synthetic peptide
SSSQVSQNY

SEQ ID NO: 8970 - protein, 9 aa, Artificial Sequence
  Description of Artificial Sequence: Synthetic peptide
TYQIYQEQY

SEQ ID NO: 8971 - protein, 10 aa, Artificial Sequence
  Description of Artificial Sequence: Synthetic peptide
MTFEPIPIHY

SEQ ID NO: 8972 - protein, 9 aa, Artificial Sequence
  Description of Artificial Sequence: Synthetic peptide
SFEPIPIHY

SEQ ID NO: 8973 - protein, 9 aa, Artificial Sequence
  Description of Artificial Sequence: Synthetic peptide
TFEPIPIHY

SEQ ID NO: 8974 - protein, 10 aa, Artificial Sequence
  Description of Artificial Sequence: Synthetic peptide
FLNKGLGISY

SEQ ID NO: 8975 - protein, 10 aa, Artificial Sequence
  Description of Artificial Sequence: Synthetic peptide
ITSEPIPIHY

SEQ ID NO: 8976 - protein, 10 aa, Artificial Sequence
  Description of Artificial Sequence: Synthetic peptide
SLYNTVATLY

SEQ ID NO: 8977 - protein, 9 aa, Artificial Sequence
  Description of Artificial Sequence: Synthetic peptide
LFNTVATLY

SEQ ID NO: 8978 - protein, 9 aa, Artificial Sequence
  Description of Artificial Sequence: Synthetic peptide
GFFPDWHNY

SEQ ID NO: 8979 - protein, 9 aa, Artificial Sequence
  Description of Artificial Sequence: Synthetic peptide
GFFPDWQNY

SEQ ID NO: 8980 - protein, 9 aa, Artificial Sequence
  Description of Artificial Sequence: Synthetic peptide
LYNTVATLY

SEQ ID NO: 8981 - protein, 9 aa, Artificial Sequence
  Description of Artificial Sequence: Synthetic peptide
LFNAVAVLY

SEQ ID NO: 8982 - protein, 9 aa, Artificial Sequence
  Description of Artificial Sequence: Synthetic peptide
LYNTVVTLY

SEQ ID NO: 8983 - protein, 9 aa, Artificial Sequence
  Description of Artificial Sequence: Synthetic peptide
SFEPIPIHY

SEQ ID NO: 8984 - protein, 10 aa, Artificial Sequence
  Description of Artificial Sequence: Synthetic peptide
INLGPGQAFY

SEQ ID NO: 8985 - protein, 10 aa, Artificial Sequence
  Description of Artificial Sequence: Synthetic peptide
MTFEPIPIHY

SEQ ID NO: 8986 - protein, 9 aa, Artificial Sequence
  Description of Artificial Sequence: Synthetic peptide
TFEPIPIHY

SEQ ID NO: 8987 - protein, 9 aa, Artificial Sequence
  Description of Artificial Sequence: Synthetic peptide
NNSQVSQNY

SEQ ID NO: 8988 - protein, 9 aa, Artificial Sequence
  Description of Artificial Sequence: Synthetic peptide
VWTIVFIEY

SEQ ID NO: 8989 - protein, 10 aa, Artificial Sequence
  Description of Artificial Sequence: Synthetic peptide
ITSEPIPIHY

SEQ ID NO: 8990 - protein, 9 aa, Artificial Sequence
  Description of Artificial Sequence: Synthetic peptide
GIFPDWQNY

SEQ ID NO: 8991 - protein, 9 aa, Artificial Sequence
  Description of Artificial Sequence: Synthetic peptide
ITKGLGISY

SEQ ID NO: 8992 - protein, 10 aa, Artificial Sequence
  Description of Artificial Sequence: Synthetic peptide
GNNSQVSQNY

SEQ ID NO: 8993 - protein, 10 aa, Artificial Sequence
  Description of Artificial Sequence: Synthetic peptide
YFSVPLHEDF

SEQ ID NO: 8994 - protein, 9 aa, Artificial Sequence
  Description of Artificial Sequence: Synthetic peptide
NSSQVSQNY

SEQ ID NO: 8995 - protein, 10 aa, Artificial Sequence
  Description of Artificial Sequence: Synthetic peptide
GSSSQVSQNY

SEQ ID NO: 8996 - protein, 9 aa, Artificial Sequence
  Description of Artificial Sequence: Synthetic peptide
LNKGLGISY

SEQ ID NO: 8997 - protein, 9 aa, Artificial Sequence
  Description of Artificial Sequence: Synthetic peptide
VTKGLGISY

SEQ ID NO: 8998 - protein, 10 aa, Artificial Sequence
  Description of Artificial Sequence: Synthetic peptide
SLFNAVAVLY

SEQ ID NO: 8999 - protein, 9 aa, Artificial Sequence
  Description of Artificial Sequence: Synthetic peptide
TVLDVGDAY

SEQ ID NO: 9000 - protein, 9 aa, Artificial Sequence
  Description of Artificial Sequence: Synthetic peptide
SSSQVSQNY

SEQ ID NO: 9001 - protein, 9 aa, Artificial Sequence
  Description of Artificial Sequence: Synthetic peptide
SEFNLPPVV

SEQ ID NO: 9002 - protein, 9 aa, Artificial Sequence
  Description of Artificial Sequence: Synthetic peptide
AERQGTVSF

SEQ ID NO: 9003 - protein, 9 aa, Artificial Sequence
  Description of Artificial Sequence: Synthetic peptide
QIKPPLPSV

SEQ ID NO: 9004 - protein, 9 aa, Artificial Sequence
  Description of Artificial Sequence: Synthetic peptide
YQSNPPPSL

SEQ ID NO: 9005 - protein, 11 aa, Artificial Sequence
  Description of Artificial Sequence: Synthetic peptide
AERQGQGTVSF

SEQ ID NO: 9006 - protein, 9 aa, Artificial Sequence
  Description of Artificial Sequence: Synthetic peptide
KIKPPLPSV

SEQ ID NO: 9007 - protein, 9 aa, Artificial Sequence
  Description of Artificial Sequence: Synthetic peptide
QELYPLTSL

SEQ ID NO: 9008 - protein, 9 aa, Artificial Sequence
  Description of Artificial Sequence: Synthetic peptide
KELYPSASL

SEQ ID NO: 9009 - protein, 9 aa, Artificial Sequence
  Description of Artificial Sequence: Synthetic peptide
VVRIEPIGV

SEQ ID NO: 9010 - protein, 9 aa, Artificial Sequence
  Description of Artificial Sequence: Synthetic peptide
KELYPLTSL

SEQ ID NO: 9011 - protein, 9 aa, Artificial Sequence
  Description of Artificial Sequence: Synthetic peptide
AIYAPPIER

SEQ ID NO: 9012 - protein, 9 aa, Artificial Sequence
  Description of Artificial Sequence: Synthetic peptide
NESVPINCI

SEQ ID NO: 9013 - protein, 9 aa, Artificial Sequence
  Description of Artificial Sequence: Synthetic peptide
VTKGLGISY

SEQ ID NO: 9014 - protein, 9 aa, Artificial Sequence
  Description of Artificial Sequence: Synthetic peptide
ITKGLGISY

SEQ ID NO: 9015 - protein, 10 aa, Artificial Sequence
  Description of Artificial Sequence: Synthetic peptide
KVNIVTDSQY

SEQ ID NO: 9016 - protein, 11 aa, Artificial Sequence
  Description of Artificial Sequence: Synthetic peptide
KQNPEIVIYQY

SEQ ID NO: 9017 - protein, 9 aa, Artificial Sequence
  Description of Artificial Sequence: Synthetic peptide
SSSQVSQNY

SEQ ID NO: 9018 - protein, 10 aa, Artificial Sequence
  Description of Artificial Sequence: Synthetic peptide
GSSSQVSQNY

SEQ ID NO: 9019 - protein, 9 aa, Artificial Sequence
  Description of Artificial Sequence: Synthetic peptide
RVMETQRNY

SEQ ID NO: 9020 - protein, 9 aa, Artificial Sequence
  Description of Artificial Sequence: Synthetic peptide
RVMGIERNY

SEQ ID NO: 9021 - protein, 9 aa, Artificial Sequence
  Description of Artificial Sequence: Synthetic peptide
NSSQVSQNY

SEQ ID NO: 9022 - protein, 11 aa, Artificial Sequence
  Description of Artificial Sequence: Synthetic peptide
KQNPEMVIYQY

SEQ ID NO: 9023 - protein, 11 aa, Artificial Sequence
  Description of Artificial Sequence: Synthetic peptide
QTGSEEIKSLY

SEQ ID NO: 9024 - protein, 9 aa, Artificial Sequence
  Description of Artificial Sequence: Synthetic peptide
GTEELRSLY

SEQ ID NO: 9025 - protein, 9 aa, Artificial Sequence
  Description of Artificial Sequence: Synthetic peptide
VTGDIRKAY

SEQ ID NO: 9026 - protein, 9 aa, Artificial Sequence
  Description of Artificial Sequence: Synthetic peptide
KQNPEIVIY

SEQ ID NO: 9027 - protein, 9 aa, Artificial Sequence
  Description of Artificial Sequence: Synthetic peptide
KQNPEMVIY

SEQ ID NO: 9028 - protein, 9 aa, Artificial Sequence
  Description of Artificial Sequence: Synthetic peptide
TVLDVGDAY

SEQ ID NO: 9029 - protein, 11 aa, Artificial Sequence
  Description of Artificial Sequence: Synthetic peptide
KQNPELIIYSY

SEQ ID NO: 9030 - protein, 11 aa, Artificial Sequence
  Description of Artificial Sequence: Synthetic peptide
TGSSSQVSQNY

SEQ ID NO: 9031 - protein, 10 aa, Artificial Sequence
  Description of Artificial Sequence: Synthetic peptide
ILKEPVHGAY

SEQ ID NO: 9032 - protein, 9 aa, Artificial Sequence
  Description of Artificial Sequence: Synthetic peptide
LGQHIYETY

SEQ ID NO: 9033 - protein, 10 aa, Artificial Sequence
  Description of Artificial Sequence: Synthetic peptide
ILKEPVHGVY

SEQ ID NO: 9034 - protein, 9 aa, Artificial Sequence
  Description of Artificial Sequence: Synthetic peptide
TYQIYQEQY

SEQ ID NO: 9035 - protein, 11 aa, Artificial Sequence
  Description of Artificial Sequence: Synthetic peptide
TGNNSQVSQNY

SEQ ID NO: 9036 - protein, 11 aa, Artificial Sequence
  Description of Artificial Sequence: Synthetic peptide
QTGTEELRSLY

SEQ ID NO: 9037 - protein, 9 aa, Artificial Sequence
  Description of Artificial Sequence: Synthetic peptide
KQNPEMIIY

SEQ ID NO: 9038 - protein, 10 aa, Artificial Sequence
  Description of Artificial Sequence: Synthetic peptide
GDNKQVSQNY

SEQ ID NO: 9039 - protein, 9 aa, Artificial Sequence
  Description of Artificial Sequence: Synthetic peptide
KAQEEHEKY

SEQ ID NO: 9040 - protein, 10 aa, Artificial Sequence
  Description of Artificial Sequence: Synthetic peptide
GLADQLIHIY

SEQ ID NO: 9041 - protein, 9 aa, Artificial Sequence
  Description of Artificial Sequence: Synthetic peptide
ITKGLGISY

SEQ ID NO: 9042 - protein, 9 aa, Artificial Sequence
  Description of Artificial Sequence: Synthetic peptide
VTKGLGISY

SEQ ID NO: 9043 - protein, 11 aa, Artificial Sequence
  Description of Artificial Sequence: Synthetic peptide
KQNPEIVIYQY

SEQ ID NO: 9044 - protein, 10 aa, Artificial Sequence
  Description of Artificial Sequence: Synthetic peptide
KVNIVTDSQY

SEQ ID NO: 9045 - protein, 10 aa, Artificial Sequence
  Description of Artificial Sequence: Synthetic peptide
GSSSQVSQNY

SEQ ID NO: 9046 - protein, 9 aa, Artificial Sequence
  Description of Artificial Sequence: Synthetic peptide
VTGDIRKAY

SEQ ID NO: 9047 - protein, 9 aa, Artificial Sequence
  Description of Artificial Sequence: Synthetic peptide
RVMETQRNY

SEQ ID NO: 9048 - protein, 9 aa, Artificial Sequence
  Description of Artificial Sequence: Synthetic peptide
KQNPEIVIY

SEQ ID NO: 9049 - protein, 9 aa, Artificial Sequence
  Description of Artificial Sequence: Synthetic peptide
SSSQVSQNY

SEQ ID NO: 9050 - protein, 11 aa, Artificial Sequence
  Description of Artificial Sequence: Synthetic peptide
QTGSEEIKSLY

SEQ ID NO: 9051 - protein, 9 aa, Artificial Sequence
  Description of Artificial Sequence: Synthetic peptide
RVMGIERNY

SEQ ID NO: 9052 - protein, 11 aa, Artificial Sequence
  Description of Artificial Sequence: Synthetic peptide
KQNPELIIYSY

SEQ ID NO: 9053 - protein, 9 aa, Artificial Sequence
  Description of Artificial Sequence: Synthetic peptide
KQNPEMVIY

SEQ ID NO: 9054 - protein, 9 aa, Artificial Sequence
  Description of Artificial Sequence: Synthetic peptide
KQNPELIIY

SEQ ID NO: 9055 - protein, 10 aa, Artificial Sequence
  Description of Artificial Sequence: Synthetic peptide
FTKKGLGVSY

SEQ ID NO: 9056 - protein, 9 aa, Artificial Sequence
  Description of Artificial Sequence: Synthetic peptide
GTEELRSLY

SEQ ID NO: 9057 - protein, 9 aa, Artificial Sequence
  Description of Artificial Sequence: Synthetic peptide
KQNPEMIIY

SEQ ID NO: 9058 - protein, 10 aa, Artificial Sequence
  Description of Artificial Sequence: Synthetic peptide
FLNKGLGISY

SEQ ID NO: 9059 - protein, 9 aa, Artificial Sequence
  Description of Artificial Sequence: Synthetic peptide
VVNRVRQGY

SEQ ID NO: 9060 - protein, 11 aa, Artificial Sequence
  Description of Artificial Sequence: Synthetic peptide
KQNPEMVIYQY

SEQ ID NO: 9061 - protein, 9 aa, Artificial Sequence
  Description of Artificial Sequence: Synthetic peptide
ATNIIGNIR

SEQ ID NO: 9062 - protein, 11 aa, Artificial Sequence
  Description of Artificial Sequence: Synthetic peptide
TVNDIQNLVER

SEQ ID NO: 9063 - protein, 9 aa, Artificial Sequence
  Description of Artificial Sequence: Synthetic peptide
AIYAPPIER

SEQ ID NO: 9064 - protein, 9 aa, Artificial Sequence
  Description of Artificial Sequence: Synthetic peptide
SVTTAMMQR

SEQ ID NO: 9065 - protein, 9 aa, Artificial Sequence
  Description of Artificial Sequence: Synthetic peptide
TTKVIGDIR

SEQ ID NO: 9066 - protein, 11 aa, Artificial Sequence
  Description of Artificial Sequence: Synthetic peptide
VTKGLGISYGR

SEQ ID NO: 9067 - protein, 9 aa, Artificial Sequence
  Description of Artificial Sequence: Synthetic peptide
VGWPAVRER

SEQ ID NO: 9068 - protein, 9 aa, Artificial Sequence
  Description of Artificial Sequence: Synthetic peptide
QIYPGIKVR

SEQ ID NO: 9069 - protein, 11 aa, Artificial Sequence
  Description of Artificial Sequence: Synthetic peptide
ITKGLGISYGR

SEQ ID NO: 9070 - protein, 11 aa, Artificial Sequence
  Description of Artificial Sequence: Synthetic peptide
TVNDIQKLVGK

SEQ ID NO: 9071 - protein, 9 aa, Artificial Sequence
  Description of Artificial Sequence: Synthetic peptide
KGLGISYGR

SEQ ID NO: 9072 - protein, 11 aa, Artificial Sequence
  Description of Artificial Sequence: Synthetic peptide
KGRPGNFLQSR

SEQ ID NO: 9073 - protein, 9 aa, Artificial Sequence
  Description of Artificial Sequence: Synthetic peptide
ILNIPVRIR

SEQ ID NO: 9074 - protein, 9 aa, Artificial Sequence
  Description of Artificial Sequence: Synthetic peptide
KGLGVSYGR

SEQ ID NO: 9075 - protein, 9 aa, Artificial Sequence
  Description of Artificial Sequence: Synthetic peptide
RQIDRLIDR

SEQ ID NO: 9076 - protein, 9 aa, Artificial Sequence
  Description of Artificial Sequence: Synthetic peptide
RLIDRIRER

SEQ ID NO: 9077 - protein, 10 aa, Artificial Sequence
  Description of Artificial Sequence: Synthetic peptide
KAIYAPPIER

SEQ ID NO: 9078 - protein, 9 aa, Artificial Sequence
  Description of Artificial Sequence: Synthetic peptide
SVTLTVQAR

SEQ ID NO: 9079 - protein, 11 aa, Artificial Sequence
  Description of Artificial Sequence: Synthetic peptide
VGPTPVNIIGR

SEQ ID NO: 9080 - protein, 9 aa, Artificial Sequence
  Description of Artificial Sequence: Synthetic peptide
ILGDIVSPR

SEQ ID NO: 9081 - protein, 9 aa, Artificial Sequence
  Description of Artificial Sequence: Synthetic peptide
CARPYQNTR

SEQ ID NO: 9082 - protein, 10 aa, Artificial Sequence
  Description of Artificial Sequence: Synthetic peptide
QIKPPLPSVR

SEQ ID NO: 9083 - protein, 9 aa, Artificial Sequence
  Description of Artificial Sequence: Synthetic peptide
VVNRVRQGY

SEQ ID NO: 9084 - protein, 9 aa, Artificial Sequence
  Description of Artificial Sequence: Synthetic peptide
VTKGLGISY

SEQ ID NO: 9085 - protein, 9 aa, Artificial Sequence
  Description of Artificial Sequence: Synthetic peptide
ITKGLGISY

SEQ ID NO: 9086 - protein, 9 aa, Artificial Sequence
  Description of Artificial Sequence: Synthetic peptide
VTGDIRKAY

SEQ ID NO: 9087 - protein, 9 aa, Artificial Sequence
  Description of Artificial Sequence: Synthetic peptide
LVNRVRQGY

SEQ ID NO: 9088 - protein, 10 aa, Artificial Sequence
  Description of Artificial Sequence: Synthetic peptide
SVVNRVRQGY

SEQ ID NO: 9089 - protein, 9 aa, Artificial Sequence
  Description of Artificial Sequence: Synthetic peptide
ATNSVTTAM

SEQ ID NO: 9090 - protein, 9 aa, Artificial Sequence
  Description of Artificial Sequence: Synthetic peptide
RVMETQRNY

SEQ ID NO: 9091 - protein, 9 aa, Artificial Sequence
  Description of Artificial Sequence: Synthetic peptide
RQRPGTVSF

SEQ ID NO: 9092 - protein, 11 aa, Artificial Sequence
  Description of Artificial Sequence: Synthetic peptide
DVKQLAEAVQR

SEQ ID NO: 9093 - protein, 11 aa, Artificial Sequence
  Description of Artificial Sequence: Synthetic peptide
ETFYVDGAANR

SEQ ID NO: 9094 - protein, 10 aa, Artificial Sequence
  Description of Artificial Sequence: Synthetic peptide
DNSDIKVVPR

SEQ ID NO: 9095 - protein, 11 aa, Artificial Sequence
  Description of Artificial Sequence: Synthetic peptide
TVNDIQNLVER

SEQ ID NO: 9096 - protein, 11 aa, Artificial Sequence
  Description of Artificial Sequence: Synthetic peptide
DNTSSETGAER

SEQ ID NO: 9097 - protein, 11 aa, Artificial Sequence
  Description of Artificial Sequence: Synthetic peptide
DIVGIDNSSNR

SEQ ID NO: 9098 - protein, 9 aa, Artificial Sequence
  Description of Artificial Sequence: Synthetic peptide
NTINITCVR

SEQ ID NO: 9099 - protein, 10 aa, Artificial Sequence
  Description of Artificial Sequence: Synthetic peptide
NANTAIMMQR

SEQ ID NO: 9100 - protein, 10 aa, Artificial Sequence
  Description of Artificial Sequence: Synthetic peptide
DNSEIKVVPR

SEQ ID NO: 9101 - protein, 9 aa, Artificial Sequence
  Description of Artificial Sequence: Synthetic peptide
MNAAIMMQR

SEQ ID NO: 9102 - protein, 11 aa, Artificial Sequence
  Description of Artificial Sequence: Synthetic peptide
DVKQLTEAVQK

SEQ ID NO: 9103 - protein, 9 aa, Artificial Sequence
  Description of Artificial Sequence: Synthetic peptide
NDIQNLVER

SEQ ID NO: 9104 - protein, 9 aa, Artificial Sequence
  Description of Artificial Sequence: Synthetic peptide
MVHHPLSPR

SEQ ID NO: 9105 - protein, 10 aa, Artificial Sequence
  Description of Artificial Sequence: Synthetic peptide
NVNAAIMMQR

SEQ ID NO: 9106 - protein, 9 aa, Artificial Sequence
  Description of Artificial Sequence: Synthetic peptide
DAWEKIRLR

SEQ ID NO: 9107 - protein, 9 aa, Artificial Sequence
  Description of Artificial Sequence: Synthetic peptide
QARVLAVER

SEQ ID NO: 9108 - protein, 11 aa, Artificial Sequence
  Description of Artificial Sequence: Synthetic peptide
TDMEKEGKISR

SEQ ID NO: 9109 - protein, 10 aa, Artificial Sequence
  Description of Artificial Sequence: Synthetic peptide
EAVDLSHFLK

SEQ ID NO: 9110 - protein, 9 aa, Artificial Sequence
  Description of Artificial Sequence: Synthetic peptide
MVHQAISPR

SEQ ID NO: 9111 - protein, 9 aa, Artificial Sequence
  Description of Artificial Sequence: Synthetic peptide
NTNITLQCR

SEQ ID NO: 9112 - protein, 11 aa, Artificial Sequence
  Description of Artificial Sequence: Synthetic peptide
TNANTAIMMQR

SEQ ID NO: 9113 - protein, 11 aa, Artificial Sequence
  Description of Artificial Sequence: Synthetic peptide
ETFYVDGAANR

SEQ ID NO: 9114 - protein, 9 aa, Artificial Sequence
  Description of Artificial Sequence: Synthetic peptide
ETVKINCTR

SEQ ID NO: 9115 - protein, 11 aa, Artificial Sequence
  Description of Artificial Sequence: Synthetic peptide
DVKQLAEAVQR

SEQ ID NO: 9116 - protein, 11 aa, Artificial Sequence
  Description of Artificial Sequence: Synthetic peptide
TVNDIQNLVER

SEQ ID NO: 9117 - protein, 9 aa, Artificial Sequence
  Description of Artificial Sequence: Synthetic peptide
NTINITCVR

SEQ ID NO: 9118 - protein, 9 aa, Artificial Sequence
  Description of Artificial Sequence: Synthetic peptide
TTKVIGDIR

SEQ ID NO: 9119 - protein, 9 aa, Artificial Sequence
  Description of Artificial Sequence: Synthetic peptide
ESVKITCAR

SEQ ID NO: 9120 - protein, 9 aa, Artificial Sequence
  Description of Artificial Sequence: Synthetic peptide
ATNIIGNIR

SEQ ID NO: 9121 - protein, 10 aa, Artificial Sequence
  Description of Artificial Sequence: Synthetic peptide
NANTAIMMQR

SEQ ID NO: 9122 - protein, 9 aa, Artificial Sequence
  Description of Artificial Sequence: Synthetic peptide
MVHQAISPR

SEQ ID NO: 9123 - protein, 10 aa, Artificial Sequence
  Description of Artificial Sequence: Synthetic peptide
DNSDIKVVPR

SEQ ID NO: 9124 - protein, 9 aa, Artificial Sequence
  Description of Artificial Sequence: Synthetic peptide
MVHHPLSPR

SEQ ID NO: 9125 - protein, 9 aa, Artificial Sequence
  Description of Artificial Sequence: Synthetic peptide
QARVLAVER

SEQ ID NO: 9126 - protein, 9 aa, Artificial Sequence
  Description of Artificial Sequence: Synthetic peptide
QARILAVER

SEQ ID NO: 9127 - protein, 9 aa, Artificial Sequence
  Description of Artificial Sequence: Synthetic peptide
FYVDGAANR

SEQ ID NO: 9128 - protein, 9 aa, Artificial Sequence
  Description of Artificial Sequence: Synthetic peptide
MVHQALSPR

SEQ ID NO: 9129 - protein, 9 aa, Artificial Sequence
  Description of Artificial Sequence: Synthetic peptide
EVSQIQQEK

SEQ ID NO: 9130 - protein, 11 aa, Artificial Sequence
  Description of Artificial Sequence: Synthetic peptide
DIVGIDNSSNR

SEQ ID NO: 9131 - protein, 9 aa, Artificial Sequence
  Description of Artificial Sequence: Synthetic peptide
MNAAIMMQR

SEQ ID NO: 9132 - protein, 11 aa, Artificial Sequence
  Description of Artificial Sequence: Synthetic peptide
TVNDIQKLVGK

SEQ ID NO: 9133 - protein, 9 aa, Artificial Sequence
  Description of Artificial Sequence: Synthetic peptide
SVTTAMMQR

SEQ ID NO: 9134 - protein, 9 aa, Artificial Sequence
  Description of Artificial Sequence: Synthetic peptide
HSDIKVVPR

SEQ ID NO: 9135 - protein, 11 aa, Artificial Sequence
  Description of Artificial Sequence: Synthetic peptide
EVKDTKEALEK

SEQ ID NO: 9136 - protein, 10 aa, Artificial Sequence
  Description of Artificial Sequence: Synthetic peptide
NVNAAIMMQR

SEQ ID NO: 9137 - protein, 9 aa, Artificial Sequence
  Description of Artificial Sequence: Synthetic peptide
EYRKIKKQR

SEQ ID NO: 9138 - protein, 10 aa, Artificial Sequence
  Description of Artificial Sequence: Synthetic peptide
EVHIPLGEAR

SEQ ID NO: 9139 - protein, 9 aa, Artificial Sequence
  Description of Artificial Sequence: Synthetic peptide
AIYAPPIER

SEQ ID NO: 9140 - protein, 10 aa, Artificial Sequence
  Description of Artificial Sequence: Synthetic peptide
DNSEIKVVPR

SEQ ID NO: 9141 - protein, 9 aa, Artificial Sequence
  Description of Artificial Sequence: Synthetic peptide
NSEIKVVPR

SEQ ID NO: 9142 - protein, 9 aa, Artificial Sequence
  Description of Artificial Sequence: Synthetic peptide
NSDIKVVPR

SEQ ID NO: 9143 - protein, 9 aa, Artificial Sequence
  Description of Artificial Sequence: Synthetic peptide
ESVPINCIR

SEQ ID NO: 9144 - protein, 8 aa, Artificial Sequence
  Description of Artificial Sequence: Synthetic peptide
NAAIMMQR

SEQ ID NO: 9145 - protein, 9 aa, Artificial Sequence
  Description of Artificial Sequence: Synthetic peptide
MYVSKKANR

SEQ ID NO: 9146 - protein, 9 aa, Artificial Sequence
  Description of Artificial Sequence: Synthetic peptide
QIYPGIKVR

SEQ ID NO: 9147 - protein, 11 aa, Artificial Sequence
  Description of Artificial Sequence: Synthetic peptide
TYATNIIGNIR

SEQ ID NO: 9148 - protein, 8 aa, Artificial Sequence
  Description of Artificial Sequence: Synthetic peptide
NTAIMMQR

SEQ ID NO: 9149 - protein, 9 aa, Artificial Sequence
  Description of Artificial Sequence: Synthetic peptide
NTNITLQCR

SEQ ID NO: 9150 - protein, 11 aa, Artificial Sequence
  Description of Artificial Sequence: Synthetic peptide
TNANTAIMMQR

SEQ ID NO: 9151 - protein, 9 aa, Artificial Sequence
  Description of Artificial Sequence: Synthetic peptide
ILGDIVSPR

SEQ ID NO: 9152 - protein, 10 aa, Artificial Sequence
  Description of Artificial Sequence: Synthetic peptide
ELKKIIGQVR

SEQ ID NO: 9153 - protein, 10 aa, Artificial Sequence
  Description of Artificial Sequence: Synthetic peptide
EFNLPPVVAK

SEQ ID NO: 9154 - protein, 8 aa, Artificial Sequence
  Description of Artificial Sequence: Synthetic peptide
IYAPPIER

SEQ ID NO: 9155 - protein, 11 aa, Artificial Sequence
  Description of Artificial Sequence: Synthetic peptide
ETFRPGGGDMR

SEQ ID NO: 9156 - protein, 10 aa, Artificial Sequence
  Description of Artificial Sequence: Synthetic peptide
QIKPPLPSVR

SEQ ID NO: 9157 - protein, 10 aa, Artificial Sequence
  Description of Artificial Sequence: Synthetic peptide
EVHIPLGDAR

SEQ ID NO: 9158 - protein, 11 aa, Artificial Sequence
  Description of Artificial Sequence: Synthetic peptide
HAGPVAPGQLR

SEQ ID NO: 9159 - protein, 9 aa, Artificial Sequence
  Description of Artificial Sequence: Synthetic peptide
EPIGVAPTR

SEQ ID NO: 9160 - protein, 8 aa, Artificial Sequence
  Description of Artificial Sequence: Synthetic peptide
TVFSLVNR

SEQ ID NO: 9161 - protein, 8 aa, Artificial Sequence
  Description of Artificial Sequence: Synthetic peptide
HSRIGINR

SEQ ID NO: 9162 - protein, 11 aa, Artificial Sequence
  Description of Artificial Sequence: Synthetic peptide
ENLAFQQGKAR

SEQ ID NO: 9163 - protein, 9 aa, Artificial Sequence
  Description of Artificial Sequence: Synthetic peptide
NDIQNLVER

SEQ ID NO: 9164 - protein, 10 aa, Artificial Sequence
  Description of Artificial Sequence: Synthetic peptide
HNYTPGPGTR

SEQ ID NO: 9165 - protein, 11 aa, Artificial Sequence
  Description of Artificial Sequence: Synthetic peptide
ETFYVDGAANR

SEQ ID NO: 9166 - protein, 11 aa, Artificial Sequence
  Description of Artificial Sequence: Synthetic peptide
DIVGIDNSSNR

SEQ ID NO: 9167 - protein, 9 aa, Artificial Sequence
  Description of Artificial Sequence: Synthetic peptide
NTINITCVR

SEQ ID NO: 9168 - protein, 9 aa, Artificial Sequence
  Description of Artificial Sequence: Synthetic peptide
EVSQIQQEK

SEQ ID NO: 9169 - protein, 9 aa, Artificial Sequence
  Description of Artificial Sequence: Synthetic peptide
SVTTAMMQR

SEQ ID NO: 9170 - protein, 9 aa, Artificial Sequence
  Description of Artificial Sequence: Synthetic peptide
ETVKINCTR

SEQ ID NO: 9171 - protein, 9 aa, Artificial Sequence
  Description of Artificial Sequence: Synthetic peptide
EPIGVAPTR

SEQ ID NO: 9172 - protein, 11 aa, Artificial Sequence
  Description of Artificial Sequence: Synthetic peptide
TVNDIQNLVER

SEQ ID NO: 9173 - protein, 11 aa, Artificial Sequence
  Description of Artificial Sequence: Synthetic peptide
FTAEVTGDIRK

SEQ ID NO: 9174 - protein, 10 aa, Artificial Sequence
  Description of Artificial Sequence: Synthetic peptide
NANTAIMMQR

SEQ ID NO: 9175 - protein, 11 aa, Artificial Sequence
  Description of Artificial Sequence: Synthetic peptide
DVKQLAEAVQR

SEQ ID NO: 9176 - protein, 10 aa, Artificial Sequence
  Description of Artificial Sequence: Synthetic peptide
DNSDIKVVPR

SEQ ID NO: 9177 - protein, 10 aa, Artificial Sequence
  Description of Artificial Sequence: Synthetic peptide
FTAEVTGDIR

SEQ ID NO: 9178 - protein, 9 aa, Artificial Sequence
  Description of Artificial Sequence: Synthetic peptide
SANNISIVK

SEQ ID NO: 9179 - protein, 10 aa, Artificial Sequence
  Description of Artificial Sequence: Synthetic peptide
NSVTTAMMQR

SEQ ID NO: 9180 - protein, 11 aa, Artificial Sequence
  Description of Artificial Sequence: Synthetic peptide
TVNDIQKLVGK

SEQ ID NO: 9181 - protein, 11 aa, Artificial Sequence
  Description of Artificial Sequence: Synthetic peptide
ETFRPGGGDMR

SEQ ID NO: 9182 - protein, 10 aa, Artificial Sequence
  Description of Artificial Sequence: Synthetic peptide
SANNISIVKK

SEQ ID NO: 9183 - protein, 11 aa, Artificial Sequence
  Description of Artificial Sequence: Synthetic peptide
PAADGVGAVSR

SEQ ID NO: 9184 - protein, 9 aa, Artificial Sequence
  Description of Artificial Sequence: Synthetic peptide
SVTLTVQAR

SEQ ID NO: 9185 - protein, 10 aa, Artificial Sequence
  Description of Artificial Sequence: Synthetic peptide
SSANNISIVK

SEQ ID NO: 9186 - protein, 10 aa, Artificial Sequence
  Description of Artificial Sequence: Synthetic peptide
DNSEIKVVPR

SEQ ID NO: 9187 - protein, 10 aa, Artificial Sequence
  Description of Artificial Sequence: Synthetic peptide
NVNAAIMMQR

SEQ ID NO: 9188 - protein, 10 aa, Artificial Sequence
  Description of Artificial Sequence: Synthetic peptide
DSSTNSTNYR

SEQ ID NO: 9189 - protein, 11 aa, Artificial Sequence
  Description of Artificial Sequence: Synthetic peptide
TNANTAIMMQR

SEQ ID NO: 9190 - protein, 10 aa, Artificial Sequence
  Description of Artificial Sequence: Synthetic peptide
YATNIIGNIR

SEQ ID NO: 9191 - protein, 9 aa, Artificial Sequence
  Description of Artificial Sequence: Synthetic peptide
NSEIKVVPR

SEQ ID NO: 9192 - protein, 11 aa, Artificial Sequence
  Description of Artificial Sequence: Synthetic peptide
SSANNISIVKK

SEQ ID NO: 9193 - protein, 10 aa, Artificial Sequence
  Description of Artificial Sequence: Synthetic peptide
EVNIVTDSQY

SEQ ID NO: 9194 - protein, 9 aa, Artificial Sequence
  Description of Artificial Sequence: Synthetic peptide
EPLGVAPTR

SEQ ID NO: 9195 - protein, 9 aa, Artificial Sequence
  Description of Artificial Sequence: Synthetic peptide
SLAEEVMVR

SEQ ID NO: 9196 - protein, 9 aa, Artificial Sequence
  Description of Artificial Sequence: Synthetic peptide
NSDIKVVPR

SEQ ID NO: 9197 - protein, 9 aa, Artificial Sequence
  Description of Artificial Sequence: Synthetic peptide
AIYAPPIER

SEQ ID NO: 9198 - protein, 9 aa, Artificial Sequence
  Description of Artificial Sequence: Synthetic peptide
ESVPINCIR

SEQ ID NO: 9199 - protein, 9 aa, Artificial Sequence
  Description of Artificial Sequence: Synthetic peptide
ATNIIGNIR

SEQ ID NO: 9200 - protein, 9 aa, Artificial Sequence
  Description of Artificial Sequence: Synthetic peptide
ESVKITCAR

SEQ ID NO: 9201 - protein, 9 aa, Artificial Sequence
  Description of Artificial Sequence: Synthetic peptide
FAVLSVVNR

SEQ ID NO: 9202 - protein, 11 aa, Artificial Sequence
  Description of Artificial Sequence: Synthetic peptide
NSSANNISIVK

SEQ ID NO: 9203 - protein, 11 aa, Artificial Sequence
  Description of Artificial Sequence: Synthetic peptide
DVKQLTEAVQK

SEQ ID NO: 9204 - protein, 10 aa, Artificial Sequence
  Description of Artificial Sequence: Synthetic peptide
EVNIITDSQY

SEQ ID NO: 9205 - protein, 10 aa, Artificial Sequence
  Description of Artificial Sequence: Synthetic peptide
EAVDLSHFLK

SEQ ID NO: 9206 - protein, 9 aa, Artificial Sequence
  Description of Artificial Sequence: Synthetic peptide
ILGDIVSPR

SEQ ID NO: 9207 - protein, 10 aa, Artificial Sequence
  Description of Artificial Sequence: Synthetic peptide
EVVSQIIEQL

SEQ ID NO: 9208 - protein, 10 aa, Artificial Sequence
  Description of Artificial Sequence: Synthetic peptide
ASVTLTVQAR

SEQ ID NO: 9209 - protein, 9 aa, Artificial Sequence
  Description of Artificial Sequence: Synthetic peptide
LTALIAPKR

SEQ ID NO: 9210 - protein, 9 aa, Artificial Sequence
  Description of Artificial Sequence: Synthetic peptide
NITGLLLTR

SEQ ID NO: 9211 - protein, 10 aa, Artificial Sequence
  Description of Artificial Sequence: Synthetic peptide
NTSSETGAER

SEQ ID NO: 9212 - protein, 9 aa, Artificial Sequence
  Description of Artificial Sequence: Synthetic peptide
TTKVIGDIR

SEQ ID NO: 9213 - protein, 10 aa, Artificial Sequence
  Description of Artificial Sequence: Synthetic peptide
NTSDSAETFR

SEQ ID NO: 9214 - protein, 10 aa, Artificial Sequence
  Description of Artificial Sequence: Synthetic peptide
DCFTDSAIRK

SEQ ID NO: 9215 - protein, 10 aa, Artificial Sequence
  Description of Artificial Sequence: Synthetic peptide
DHSDIKVVPR

SEQ ID NO: 9216 - protein, 9 aa, Artificial Sequence
  Description of Artificial Sequence: Synthetic peptide
MNAAIMMQR

SEQ ID NO: 9217 - protein, 9 aa, Artificial Sequence
  Description of Artificial Sequence: Synthetic peptide
MVHQAISPR

SEQ ID NO: 9218 - protein, 11 aa, Artificial Sequence
  Description of Artificial Sequence: Synthetic peptide
EPIGLAPTAAK

SEQ ID NO: 9219 - protein, 10 aa, Artificial Sequence
  Description of Artificial Sequence: Synthetic peptide
DIIATDIQTK

SEQ ID NO: 9220 - protein, 9 aa, Artificial Sequence
  Description of Artificial Sequence: Synthetic peptide
HSDIKVVPR

SEQ ID NO: 9221 - protein, 11 aa, Artificial Sequence
  Description of Artificial Sequence: Synthetic peptide
TAIAVAEGTDR

SEQ ID NO: 9222 - protein, 11 aa, Artificial Sequence
  Description of Artificial Sequence: Synthetic peptide
QVAGDDCVASR

SEQ ID NO: 9223 - protein, 11 aa, Artificial Sequence
  Description of Artificial Sequence: Synthetic peptide
VGPTPVNIIGR

SEQ ID NO: 9224 - protein, 10 aa, Artificial Sequence
  Description of Artificial Sequence: Synthetic peptide
ESWTVNDIQK

SEQ ID NO: 9225 - protein, 10 aa, Artificial Sequence
  Description of Artificial Sequence: Synthetic peptide
AADGVGAVSR

SEQ ID NO: 9226 - protein, 9 aa, Artificial Sequence
  Description of Artificial Sequence: Synthetic peptide
NDIQNLVER

SEQ ID NO: 9227 - protein, 8 aa, Artificial Sequence
  Description of Artificial Sequence: Synthetic peptide
NTAIMMQR

SEQ ID NO: 9228 - protein, 10 aa, Artificial Sequence
  Description of Artificial Sequence: Synthetic peptide
EVTGDIRKAY

SEQ ID NO: 9229 - protein, 9 aa, Artificial Sequence
  Description of Artificial Sequence: Synthetic peptide
ETAYFILKL

SEQ ID NO: 9230 - protein, 9 aa, Artificial Sequence
  Description of Artificial Sequence: Synthetic peptide
EAVDLSHFL

SEQ ID NO: 9231 - protein, 9 aa, Artificial Sequence
  Description of Artificial Sequence: Synthetic peptide
ETAYFLLKL

SEQ ID NO: 9232 - protein, 10 aa, Artificial Sequence
  Description of Artificial Sequence: Synthetic peptide
ETYGDTWVGV

SEQ ID NO: 9233 - protein, 9 aa, Artificial Sequence
  Description of Artificial Sequence: Synthetic peptide
TVFSLVNRV

SEQ ID NO: 9234 - protein, 9 aa, Artificial Sequence
  Description of Artificial Sequence: Synthetic peptide
ETITIPCRI

SEQ ID NO: 9235 - protein, 9 aa, Artificial Sequence
  Description of Artificial Sequence: Synthetic peptide
TTSVITQAC

SEQ ID NO: 9236 - protein, 10 aa, Artificial Sequence
  Description of Artificial Sequence: Synthetic peptide
EVVSQIIEQL

SEQ ID NO: 9237 - protein, 9 aa, Artificial Sequence
  Description of Artificial Sequence: Synthetic peptide
NTSAITQAC

SEQ ID NO: 9238 - protein, 9 aa, Artificial Sequence
  Description of Artificial Sequence: Synthetic peptide
EITAIAALV

SEQ ID NO: 9239 - protein, 9 aa, Artificial Sequence
  Description of Artificial Sequence: Synthetic peptide
LVSQIIEQL

SEQ ID NO: 9240 - protein, 9 aa, Artificial Sequence
  Description of Artificial Sequence: Synthetic peptide
VVSQIIEQL

SEQ ID NO: 9241 - protein, 9 aa, Artificial Sequence
  Description of Artificial Sequence: Synthetic peptide
YATNIIGNI

SEQ ID NO: 9242 - protein, 9 aa, Artificial Sequence
  Description of Artificial Sequence: Synthetic peptide
EAMSQATNV

SEQ ID NO: 9243 - protein, 11 aa, Artificial Sequence
  Description of Artificial Sequence: Synthetic peptide
EVIPLTAEAEL

SEQ ID NO: 9244 - protein, 11 aa, Artificial Sequence
  Description of Artificial Sequence: Synthetic peptide
EVIPLTKEAEL

SEQ ID NO: 9245 - protein, 9 aa, Artificial Sequence
  Description of Artificial Sequence: Synthetic peptide
EVSQIQQEK

SEQ ID NO: 9246 - protein, 9 aa, Artificial Sequence
  Description of Artificial Sequence: Synthetic peptide
QTTELQKQI

SEQ ID NO: 9247 - protein, 9 aa, Artificial Sequence
  Description of Artificial Sequence: Synthetic peptide
EALDLSHFL

SEQ ID NO: 9248 - protein, 11 aa, Artificial Sequence
  Description of Artificial Sequence: Synthetic peptide
FTAEVTGDIRK

SEQ ID NO: 9249 - protein, 9 aa, Artificial Sequence
  Description of Artificial Sequence: Synthetic peptide
TVNDIQKLV

SEQ ID NO: 9250 - protein, 9 aa, Artificial Sequence
  Description of Artificial Sequence: Synthetic peptide
TVNDIQNLV

SEQ ID NO: 9251 - protein, 9 aa, Artificial Sequence
  Description of Artificial Sequence: Synthetic peptide
EILAIVALV

SEQ ID NO: 9252 - protein, 9 aa, Artificial Sequence
  Description of Artificial Sequence: Synthetic peptide
TTSNLQEQI

SEQ ID NO: 9253 - protein, 9 aa, Artificial Sequence
  Description of Artificial Sequence: Synthetic peptide
EVIPLTAEA

SEQ ID NO: 9254 - protein, 9 aa, Artificial Sequence
  Description of Artificial Sequence: Synthetic peptide
NVKTIIVQL

SEQ ID NO: 9255 - protein, 11 aa, Artificial Sequence
  Description of Artificial Sequence: Synthetic peptide
EVVSQIIEQLI

SEQ ID NO: 9256 - protein, 9 aa, Artificial Sequence
  Description of Artificial Sequence: Synthetic peptide
MTYSVAEQL

SEQ ID NO: 9257 - protein, 9 aa, Artificial Sequence
  Description of Artificial Sequence: Synthetic peptide
ETNNSTITI

SEQ ID NO: 9258 - protein, 9 aa, Artificial Sequence
  Description of Artificial Sequence: Synthetic peptide
ETNSLLHPI

SEQ ID NO: 9259 - protein, 9 aa, Artificial Sequence
  Description of Artificial Sequence: Synthetic peptide
EIKSLYNTV

SEQ ID NO: 9260 - protein, 9 aa, Artificial Sequence
  Description of Artificial Sequence: Synthetic peptide
EVIIRSENL

SEQ ID NO: 9261 - protein, 9 aa, Artificial Sequence
  Description of Artificial Sequence: Synthetic peptide
YTAFTISSI

SEQ ID NO: 9262 - protein, 9 aa, Artificial Sequence
  Description of Artificial Sequence: Synthetic peptide
FTAEVTGDI

SEQ ID NO: 9263 - protein, 10 aa, Artificial Sequence
  Description of Artificial Sequence: Synthetic peptide
ETYGDTWAGV

SEQ ID NO: 9264 - protein, 9 aa, Artificial Sequence
  Description of Artificial Sequence: Synthetic peptide
ETITLQCRI

SEQ ID NO: 9265 - protein, 9 aa, Artificial Sequence
  Description of Artificial Sequence: Synthetic peptide
FTTKVIGDI

SEQ ID NO: 9266 - protein, 9 aa, Artificial Sequence
  Description of Artificial Sequence: Synthetic peptide
SAVSLFNTI

SEQ ID NO: 9267 - protein, 9 aa, Artificial Sequence
  Description of Artificial Sequence: Synthetic peptide
NTVATLYCV

SEQ ID NO: 9268 - protein, 11 aa, Artificial Sequence
  Description of Artificial Sequence: Synthetic peptide
EVIPLTEEAEL

SEQ ID NO: 9269 - protein, 9 aa, Artificial Sequence
  Description of Artificial Sequence: Synthetic peptide
TTSTLQEQI

SEQ ID NO: 9270 - protein, 9 aa, Artificial Sequence
  Description of Artificial Sequence: Synthetic peptide
LVAALIIAI

SEQ ID NO: 9271 - protein, 9 aa, Artificial Sequence
  Description of Artificial Sequence: Synthetic peptide
EVIPMFSAL

SEQ ID NO: 9272 - protein, 9 aa, Artificial Sequence
  Description of Artificial Sequence: Synthetic peptide
EIFGFGEEI

SEQ ID NO: 9273 - protein, 9 aa, Artificial Sequence
  Description of Artificial Sequence: Synthetic peptide
EVIPLTEEA

SEQ ID NO: 9274 - protein, 10 aa, Artificial Sequence
  Description of Artificial Sequence: Synthetic peptide
FTAEVTGDIR

SEQ ID NO: 9275 - protein, 9 aa, Artificial Sequence
  Description of Artificial Sequence: Synthetic peptide
SASSLFDAI

SEQ ID NO: 9276 - protein, 9 aa, Artificial Sequence
  Description of Artificial Sequence: Synthetic peptide
GAASVTLTV

SEQ ID NO: 9277 - protein, 11 aa, Artificial Sequence
  Description of Artificial Sequence: Synthetic peptide
ETFYVDGAANR

SEQ ID NO: 9278 - protein, 9 aa, Artificial Sequence
  Description of Artificial Sequence: Synthetic peptide
DVKQLTEAV

SEQ ID NO: 9279 - protein, 9 aa, Artificial Sequence
  Description of Artificial Sequence: Synthetic peptide
LVNQIIEQL

SEQ ID NO: 9280 - protein, 9 aa, Artificial Sequence
  Description of Artificial Sequence: Synthetic peptide
ESFGFGEEI

SEQ ID NO: 9281 - protein, 9 aa, Artificial Sequence
  Description of Artificial Sequence: Synthetic peptide
NAVAVLYCV

SEQ ID NO: 9282 - protein, 10 aa, Artificial Sequence
  Description of Artificial Sequence: Synthetic peptide
NTSAVPNETI

SEQ ID NO: 9283 - protein, 9 aa, Artificial Sequence
  Description of Artificial Sequence: Synthetic peptide
MTSNPPIPV

SEQ ID NO: 9284 - protein, 9 aa, Artificial Sequence
  Description of Artificial Sequence: Synthetic peptide
CTTSVITQA

SEQ ID NO: 9285 - protein, 10 aa, Artificial Sequence
  Description of Artificial Sequence: Synthetic peptide
LVSQIIEQLI

SEQ ID NO: 9286 - protein, 9 aa, Artificial Sequence
  Description of Artificial Sequence: Synthetic peptide
STITIPCRI

SEQ ID NO: 9287 - protein, 10 aa, Artificial Sequence
  Description of Artificial Sequence: Synthetic peptide
VVSQIIEQLI

SEQ ID NO: 9288 - protein, 9 aa, Artificial Sequence
  Description of Artificial Sequence: Synthetic peptide
STNSTNYRL

SEQ ID NO: 9289 - protein, 9 aa, Artificial Sequence
  Description of Artificial Sequence: Synthetic peptide
IAALVIASI

SEQ ID NO: 9290 - protein, 9 aa, Artificial Sequence
  Description of Artificial Sequence: Synthetic peptide
QNYPIVQNL

SEQ ID NO: 9291 - protein, 9 aa, Artificial Sequence
  Description of Artificial Sequence: Synthetic peptide
NAKNIIVQL

SEQ ID NO: 9292 - protein, 9 aa, Artificial Sequence
  Description of Artificial Sequence: Synthetic peptide
YSTQIDPGL

SEQ ID NO: 9293 - protein, 9 aa, Artificial Sequence
  Description of Artificial Sequence: Synthetic peptide
TPIGLGQSL

SEQ ID NO: 9294 - protein, 9 aa, Artificial Sequence
  Description of Artificial Sequence: Synthetic peptide
SPAIFQSSM

SEQ ID NO: 9295 - protein, 9 aa, Artificial Sequence
  Description of Artificial Sequence: Synthetic peptide
FPQGKAGEL

SEQ ID NO: 9296 - protein, 9 aa, Artificial Sequence
  Description of Artificial Sequence: Synthetic peptide
YPSASLKSL

SEQ ID NO: 9297 - protein, 9 aa, Artificial Sequence
  Description of Artificial Sequence: Synthetic peptide
SPTSRELRV

SEQ ID NO: 9298 - protein, 9 aa, Artificial Sequence
  Description of Artificial Sequence: Synthetic peptide
RPMTYKEAL

SEQ ID NO: 9299 - protein, 10 aa, Artificial Sequence
  Description of Artificial Sequence: Synthetic peptide
RPNSNTRKSI

SEQ ID NO: 9300 - protein, 9 aa, Artificial Sequence
  Description of Artificial Sequence: Synthetic peptide
RPMTYKAAL

SEQ ID NO: 9301 - protein, 9 aa, Artificial Sequence
  Description of Artificial Sequence: Synthetic peptide
APPIERNIL

SEQ ID NO: 9302 - protein, 9 aa, Artificial Sequence
  Description of Artificial Sequence: Synthetic peptide
GPSHKARVL

SEQ ID NO: 9303 - protein, 10 aa, Artificial Sequence
  Description of Artificial Sequence: Synthetic peptide
RPAEPVPLQL

SEQ ID NO: 9304 - protein, 10 aa, Artificial Sequence
  Description of Artificial Sequence: Synthetic peptide
SPIATVPVKL

SEQ ID NO: 9305 - protein, 8 aa, Artificial Sequence
  Description of Artificial Sequence: Synthetic peptide
KPVVSTQL

SEQ ID NO: 9306 - protein, 8 aa, Artificial Sequence
  Description of Artificial Sequence: Synthetic peptide
RPVVSTQL

SEQ ID NO: 9307 - protein, 9 aa, Artificial Sequence
  Description of Artificial Sequence: Synthetic peptide
AERQGTVSF

SEQ ID NO: 9308 - protein, 10 aa, Artificial Sequence
  Description of Artificial Sequence: Synthetic peptide
SPIETVPVKL

SEQ ID NO: 9309 - protein, 10 aa, Artificial Sequence
  Description of Artificial Sequence: Synthetic peptide
RPYNNTRQST

SEQ ID NO: 9310 - protein, 9 aa, Artificial Sequence
  Description of Artificial Sequence: Synthetic peptide
SPTSRDLRI

SEQ ID NO: 9311 - protein, 9 aa, Artificial Sequence
  Description of Artificial Sequence: Synthetic peptide
RPQAPLRPM

SEQ ID NO: 9312 - protein, 9 aa, Artificial Sequence
  Description of Artificial Sequence: Synthetic peptide
TPQDLNTML

SEQ ID NO: 9313 - protein, 9 aa, Artificial Sequence
  Description of Artificial Sequence: Synthetic peptide
ELKNSAVSL

SEQ ID NO: 9314 - protein, 9 aa, Artificial Sequence
  Description of Artificial Sequence: Synthetic peptide
TMGARSVTL

SEQ ID NO: 9315 - protein, 9 aa, Artificial Sequence
  Description of Artificial Sequence: Synthetic peptide
EVMVRSENL

SEQ ID NO: 9316 - protein, 9 aa, Artificial Sequence
  Description of Artificial Sequence: Synthetic peptide
ELKNSAISL

SEQ ID NO: 9317 - protein, 9 aa, Artificial Sequence
  Description of Artificial Sequence: Synthetic peptide
EVIIRSENL

SEQ ID NO: 9318 - protein, 9 aa, Artificial Sequence
  Description of Artificial Sequence: Synthetic peptide
DVKDTKEAL

SEQ ID NO: 9319 - protein, 9 aa, Artificial Sequence
  Description of Artificial Sequence: Synthetic peptide
DVKQLTEAV

SEQ ID NO: 9320 - protein, 9 aa, Artificial Sequence
  Description of Artificial Sequence: Synthetic peptide
DSAIRKAIL

SEQ ID NO: 9321 - protein, 8 aa, Artificial Sequence
  Description of Artificial Sequence: Synthetic peptide
TTNQKTEL

SEQ ID NO: 9322 - protein, 8 aa, Artificial Sequence
  Description of Artificial Sequence: Synthetic peptide
TVQARQVL

SEQ ID NO: 9323 - protein, 9 aa, Artificial Sequence
  Description of Artificial Sequence: Synthetic peptide
DVKQLAEAV

SEQ ID NO: 9324 - protein, 8 aa, Artificial Sequence
  Description of Artificial Sequence: Synthetic peptide
HLKTAVQM

SEQ ID NO: 9325 - protein, 9 aa, Artificial Sequence
  Description of Artificial Sequence: Synthetic peptide
ELKSLFNTV

SEQ ID NO: 9326 - protein, 11 aa, Artificial Sequence
  Description of Artificial Sequence: Synthetic peptide
TQIDPGLADQL

SEQ ID NO: 9327 - protein, 11 aa, Artificial Sequence
  Description of Artificial Sequence: Synthetic peptide
TQVDPGLADQL

SEQ ID NO: 9328 - protein, 10 aa, Artificial Sequence
  Description of Artificial Sequence: Synthetic peptide
RQIDSIGERI

SEQ ID NO: 9329 - protein, 10 aa, Artificial Sequence
  Description of Artificial Sequence: Synthetic peptide
AQEEADEVGF

SEQ ID NO: 9330 - protein, 9 aa, Artificial Sequence
  Description of Artificial Sequence: Synthetic peptide
AQTNDACAW

SEQ ID NO: 9331 - protein, 9 aa, Artificial Sequence
  Description of Artificial Sequence: Synthetic peptide
GQDQWTYQI

SEQ ID NO: 9332 - protein, 9 aa, Artificial Sequence
  Description of Artificial Sequence: Synthetic peptide
KQEQGQWTY

SEQ ID NO: 9333 - protein, 9 aa, Artificial Sequence
  Description of Artificial Sequence: Synthetic peptide
KLENVTENF

SEQ ID NO: 9334 - protein, 9 aa, Artificial Sequence
  Description of Artificial Sequence: Synthetic peptide
IQKQGQDQW

SEQ ID NO: 9335 - protein, 10 aa, Artificial Sequence
  Description of Artificial Sequence: Synthetic peptide
AQEESDEVGF

SEQ ID NO: 9336 - protein, 10 aa, Artificial Sequence
  Description of Artificial Sequence: Synthetic peptide
GQVRDQAEHL

SEQ ID NO: 9337 - protein, 9 aa, Artificial Sequence
  Description of Artificial Sequence: Synthetic peptide
YQSNPPPSL

SEQ ID NO: 9338 - protein, 9 aa, Artificial Sequence
  Description of Artificial Sequence: Synthetic peptide
RQGQGTVSF

SEQ ID NO: 9339 - protein, 9 aa, Artificial Sequence
  Description of Artificial Sequence: Synthetic peptide
GQLDAWEKI

SEQ ID NO: 9340 - protein, 9 aa, Artificial Sequence
  Description of Artificial Sequence: Synthetic peptide
AQEEEEVGF

SEQ ID NO: 9341 - protein, 9 aa, Artificial Sequence
  Description of Artificial Sequence: Synthetic peptide
VLDNVTENF

SEQ ID NO: 9342 - protein, 9 aa, Artificial Sequence
  Description of Artificial Sequence: Synthetic peptide
ALENVTENF

SEQ ID NO: 9343 - protein, 10 aa, Artificial Sequence
  Description of Artificial Sequence: Synthetic peptide
LQDSGAKVNI

SEQ ID NO: 9344 - protein, 9 aa, Artificial Sequence
  Description of Artificial Sequence: Synthetic peptide
KQVAGDDCV

SEQ ID NO: 9345 - protein, 10 aa, Artificial Sequence
  Description of Artificial Sequence: Synthetic peptide
KQLTEAVQKI

SEQ ID NO: 9346 - protein, 10 aa, Artificial Sequence
  Description of Artificial Sequence: Synthetic peptide
GINNSTNETF

SEQ ID NO: 9347 - protein, 9 aa, Artificial Sequence
  Description of Artificial Sequence: Synthetic peptide
QLAEAVQRI

SEQ ID NO: 9348 - protein, 9 aa, Artificial Sequence
  Description of Artificial Sequence: Synthetic peptide
GQALFTTKV

SEQ ID NO: 9349 - protein, 9 aa, Artificial Sequence
  Description of Artificial Sequence: Synthetic peptide
GAASVTLTV

SEQ ID NO: 9350 - protein, 9 aa, Artificial Sequence
  Description of Artificial Sequence: Synthetic peptide
QLAEAVQRI

SEQ ID NO: 9351 - protein, 9 aa, Artificial Sequence
  Description of Artificial Sequence: Synthetic peptide
QLTEAVQKI

SEQ ID NO: 9352 - protein, 8 aa, Artificial Sequence
  Description of Artificial Sequence: Synthetic peptide
GQMVHQAI

SEQ ID NO: 9353 - protein, 9 aa, Artificial Sequence
  Description of Artificial Sequence: Synthetic peptide
SQIYPGIKV

SEQ ID NO: 9354 - protein, 9 aa, Artificial Sequence
  Description of Artificial Sequence: Synthetic peptide
SQIYSGIKV

SEQ ID NO: 9355 - protein, 9 aa, Artificial Sequence
  Description of Artificial Sequence: Synthetic peptide
GQLDAWEKI

SEQ ID NO: 9356 - protein, 9 aa, Artificial Sequence
  Description of Artificial Sequence: Synthetic peptide
QQHLLQLTV

SEQ ID NO: 9357 - protein, 9 aa, Artificial Sequence
  Description of Artificial Sequence: Synthetic peptide
GQTFFTAEV

SEQ ID NO: 9358 - protein, 9 aa, Artificial Sequence
  Description of Artificial Sequence: Synthetic peptide
GQVDCSPGI

SEQ ID NO: 9359 - protein, 9 aa, Artificial Sequence
  Description of Artificial Sequence: Synthetic peptide
GAASLTLTV

SEQ ID NO: 9360 - protein, 9 aa, Artificial Sequence
  Description of Artificial Sequence: Synthetic peptide
VQLNETVKI

SEQ ID NO: 9361 - protein, 9 aa, Artificial Sequence
  Description of Artificial Sequence: Synthetic peptide
VQKIATESI

SEQ ID NO: 9362 - protein, 9 aa, Artificial Sequence
  Description of Artificial Sequence: Synthetic peptide
AVLSVVNRV

SEQ ID NO: 9363 - protein, 9 aa, Artificial Sequence
  Description of Artificial Sequence: Synthetic peptide
GQDQWTYQI

SEQ ID NO: 9364 - protein, 8 aa, Artificial Sequence
  Description of Artificial Sequence: Synthetic peptide
VQIEPLGV

SEQ ID NO: 9365 - protein, 9 aa, Artificial Sequence
  Description of Artificial Sequence: Synthetic peptide
VQRISTESI

SEQ ID NO: 9366 - protein, 10 aa, Artificial Sequence
  Description of Artificial Sequence: Synthetic peptide
RQIDSIGERI

SEQ ID NO: 9367 - protein, 10 aa, Artificial Sequence
  Description of Artificial Sequence: Synthetic peptide
AQWSKTLQQV

SEQ ID NO: 9368 - protein, 10 aa, Artificial Sequence
  Description of Artificial Sequence: Synthetic peptide
RQYDQIPLEI

SEQ ID NO: 9369 - protein, 9 aa, Artificial Sequence
  Description of Artificial Sequence: Synthetic peptide
GAVSLTLTV

SEQ ID NO: 9370 - protein, 9 aa, Artificial Sequence
  Description of Artificial Sequence: Synthetic peptide
VQKIAQECI

SEQ ID NO: 9371 - protein, 8 aa, Artificial Sequence
  Description of Artificial Sequence: Synthetic peptide
SQIIEQLI

SEQ ID NO: 9372 - protein, 9 aa, Artificial Sequence
  Description of Artificial Sequence: Synthetic peptide
VQLNNTINI

SEQ ID NO: 9373 - protein, 10 aa, Artificial Sequence
  Description of Artificial Sequence: Synthetic peptide
RQYDQIPIEI

SEQ ID NO: 9374 - protein, 9 aa, Artificial Sequence
  Description of Artificial Sequence: Synthetic peptide
AILNIPVRI

SEQ ID NO: 9375 - protein, 8 aa, Artificial Sequence
  Description of Artificial Sequence: Synthetic peptide
GQMVHQAL

SEQ ID NO: 9376 - protein, 9 aa, Artificial Sequence
  Description of Artificial Sequence: Synthetic peptide
AVLSLVNRV

SEQ ID NO: 9377 - protein, 10 aa, Artificial Sequence
  Description of Artificial Sequence: Synthetic peptide
SQATNVNAAI

SEQ ID NO: 9378 - protein, 10 aa, Artificial Sequence
  Description of Artificial Sequence: Synthetic peptide
KQLTEAVQKI

SEQ ID NO: 9379 - protein, 9 aa, Artificial Sequence
  Description of Artificial Sequence: Synthetic peptide
TQGVGSHQI

SEQ ID NO: 9380 - protein, 9 aa, Artificial Sequence
  Description of Artificial Sequence: Synthetic peptide
GQLQPALKT

SEQ ID NO: 9381 - protein, 9 aa, Artificial Sequence
  Description of Artificial Sequence: Synthetic peptide
VITQACPKI

SEQ ID NO: 9382 - protein, 9 aa, Artificial Sequence
  Description of Artificial Sequence: Synthetic peptide
YQLEKEPII

SEQ ID NO: 9383 - protein, 9 aa, Artificial Sequence
  Description of Artificial Sequence: Synthetic peptide
GQKAIGTVL

SEQ ID NO: 9384 - protein, 9 aa, Artificial Sequence
  Description of Artificial Sequence: Synthetic peptide
YQSNPPPSL

SEQ ID NO: 9385 - protein, 9 aa, Artificial Sequence
  Description of Artificial Sequence: Synthetic peptide
TQGVGHPQI

SEQ ID NO: 9386 - protein, 8 aa, Artificial Sequence
  Description of Artificial Sequence: Synthetic peptide
NQIIEQLI

SEQ ID NO: 9387 - protein, 9 aa, Artificial Sequence
  Description of Artificial Sequence: Synthetic peptide
SLYNTVVTL

SEQ ID NO: 9388 - protein, 9 aa, Artificial Sequence
  Description of Artificial Sequence: Synthetic peptide
SQATAGMNA

SEQ ID NO: 9389 - protein, 9 aa, Artificial Sequence
  Description of Artificial Sequence: Synthetic peptide
VVKIEPLGV

SEQ ID NO: 9390 - protein, 9 aa, Artificial Sequence
  Description of Artificial Sequence: Synthetic peptide
GLFNSTWNI

SEQ ID NO: 9391 - protein, 11 aa, Artificial Sequence
  Description of Artificial Sequence: Synthetic peptide
SQATAGMNAAI

SEQ ID NO: 9392 - protein, 9 aa, Artificial Sequence
  Description of Artificial Sequence: Synthetic peptide
SAVSLFNTI

SEQ ID NO: 9393 - protein, 9 aa, Artificial Sequence
  Description of Artificial Sequence: Synthetic peptide
SQVSQNYPI

SEQ ID NO: 9394 - protein, 9 aa, Artificial Sequence
  Description of Artificial Sequence: Synthetic peptide
GVGSTQISV

SEQ ID NO: 9395 - protein, 10 aa, Artificial Sequence
  Description of Artificial Sequence: Synthetic peptide
KQLAEAVQRI

SEQ ID NO: 9396 - protein, 8 aa, Artificial Sequence
  Description of Artificial Sequence: Synthetic peptide
GQETAYFI

SEQ ID NO: 9397 - protein, 10 aa, Artificial Sequence
  Description of Artificial Sequence: Synthetic peptide
SQATNANTAI

SEQ ID NO: 9398 - protein, 10 aa, Artificial Sequence
  Description of Artificial Sequence: Synthetic peptide
KVVQIEPLGV

SEQ ID NO: 9399 - protein, 9 aa, Artificial Sequence
  Description of Artificial Sequence: Synthetic peptide
NQKTELQAI

SEQ ID NO: 9400 - protein, 9 aa, Artificial Sequence
  Description of Artificial Sequence: Synthetic peptide
VVQIEPLGV

SEQ ID NO: 9401 - protein, 9 aa, Artificial Sequence
  Description of Artificial Sequence: Synthetic peptide
IIGQLQPAI

SEQ ID NO: 9402 - protein, 9 aa, Artificial Sequence
  Description of Artificial Sequence: Synthetic peptide
VQKIALEGI

SEQ ID NO: 9403 - protein, 8 aa, Artificial Sequence
  Description of Artificial Sequence: Synthetic peptide
SLLEVSQI

SEQ ID NO: 9404 - protein, 9 aa, Artificial Sequence
  Description of Artificial Sequence: Synthetic peptide
GSNFTSATV

SEQ ID NO: 9405 - protein, 9 aa, Artificial Sequence
  Description of Artificial Sequence: Synthetic peptide
ALQDSGLEV

SEQ ID NO: 9406 - protein, 9 aa, Artificial Sequence
  Description of Artificial Sequence: Synthetic peptide
AMSQATNSV

SEQ ID NO: 9407 - protein, 9 aa, Artificial Sequence
  Description of Artificial Sequence: Synthetic peptide
TRIGPGQAL

SEQ ID NO: 9408 - protein, 9 aa, Artificial Sequence
  Description of Artificial Sequence: Synthetic peptide
ERYLKDQQL

SEQ ID NO: 9409 - protein, 9 aa, Artificial Sequence
  Description of Artificial Sequence: Synthetic peptide
ERYALNPGL

SEQ ID NO: 9410 - protein, 9 aa, Artificial Sequence
  Description of Artificial Sequence: Synthetic peptide
ERFALNPGL

SEQ ID NO: 9411 - protein, 8 aa, Artificial Sequence
  Description of Artificial Sequence: Synthetic peptide
ERIISTYL

SEQ ID NO: 9412 - protein, 8 aa, Artificial Sequence
  Description of Artificial Sequence: Synthetic peptide
GQMVHQAL

SEQ ID NO: 9413 - protein, 9 aa, Artificial Sequence
  Description of Artificial Sequence: Synthetic peptide
ERYLKDQQL

SEQ ID NO: 9414 - protein, 9 aa, Artificial Sequence
  Description of Artificial Sequence: Synthetic peptide
TRIGPGQAL

SEQ ID NO: 9415 - protein, 8 aa, Artificial Sequence
  Description of Artificial Sequence: Synthetic peptide
GQMVHQAI

SEQ ID NO: 9416 - protein, 8 aa, Artificial Sequence
  Description of Artificial Sequence: Synthetic peptide
GQMVHHPL

SEQ ID NO: 9417 - protein, 8 aa, Artificial Sequence
  Description of Artificial Sequence: Synthetic peptide
IQKLVGKL

SEQ ID NO: 9418 - protein, 9 aa, Artificial Sequence
  Description of Artificial Sequence: Synthetic peptide
EVMVRSENL

SEQ ID NO: 9419 - protein, 9 aa, Artificial Sequence
  Description of Artificial Sequence: Synthetic peptide
VTKGLGISY

SEQ ID NO: 9420 - protein, 9 aa, Artificial Sequence
  Description of Artificial Sequence: Synthetic peptide
GQKAIGTVL

SEQ ID NO: 9421 - protein, 9 aa, Artificial Sequence
  Description of Artificial Sequence: Synthetic peptide
RQRPGTVSF

SEQ ID NO: 9422 - protein, 9 aa, Artificial Sequence
  Description of Artificial Sequence: Synthetic peptide
ITKGLGISY

SEQ ID NO: 9423 - protein, 9 aa, Artificial Sequence
  Description of Artificial Sequence: Synthetic peptide
RQGQGTVSF

SEQ ID NO: 9424 - protein, 10 aa, Artificial Sequence
  Description of Artificial Sequence: Synthetic peptide
AINSSQNETF

SEQ ID NO: 9425 - protein, 9 aa, Artificial Sequence
  Description of Artificial Sequence: Synthetic peptide
KQNPEIVIY

SEQ ID NO: 9426 - protein, 10 aa, Artificial Sequence
  Description of Artificial Sequence: Synthetic peptide
GINNSTNETF

SEQ ID NO: 9427 - protein, 8 aa, Artificial Sequence
  Description of Artificial Sequence: Synthetic peptide
GQFIYETY

SEQ ID NO: 9428 - protein, 8 aa, Artificial Sequence
  Description of Artificial Sequence: Synthetic peptide
GQMVHQAL

SEQ ID NO: 9429 - protein, 9 aa, Artificial Sequence
  Description of Artificial Sequence: Synthetic peptide
KQNPEMVIY

SEQ ID NO: 9430 - protein, 9 aa, Artificial Sequence
  Description of Artificial Sequence: Synthetic peptide
ATNSVTTAM

SEQ ID NO: 9431 - protein, 8 aa, Artificial Sequence
  Description of Artificial Sequence: Synthetic peptide
YQIYQEQY

SEQ ID NO: 9432 - protein, 10 aa, Artificial Sequence
  Description of Artificial Sequence: Synthetic peptide
KVNIVTDSQY

SEQ ID NO: 9433 - protein, 9 aa, Artificial Sequence
  Description of Artificial Sequence: Synthetic peptide
RVMETQRNY

SEQ ID NO: 9434 - protein, 11 aa, Artificial Sequence
  Description of Artificial Sequence: Synthetic peptide
IQKQEQGQWTY

SEQ ID NO: 9435 - protein, 9 aa, Artificial Sequence
  Description of Artificial Sequence: Synthetic peptide
TQACPKVSF

SEQ ID NO: 9436 - protein, 9 aa, Artificial Sequence
  Description of Artificial Sequence: Synthetic peptide
KQITKIQNF

SEQ ID NO: 9437 - protein, 9 aa, Artificial Sequence
  Description of Artificial Sequence: Synthetic peptide
VQKIATESI

SEQ ID NO: 9438 - protein, 8 aa, Artificial Sequence
  Description of Artificial Sequence: Synthetic peptide
GQHIYETY

SEQ ID NO: 9439 - protein, 9 aa, Artificial Sequence
  Description of Artificial Sequence: Synthetic peptide
AERQGTVSF

SEQ ID NO: 9440 - protein, 9 aa, Artificial Sequence
  Description of Artificial Sequence: Synthetic peptide
TQIGCTLNF

SEQ ID NO: 9441 - protein, 9 aa, Artificial Sequence
  Description of Artificial Sequence: Synthetic peptide
KQNPEMIIY

SEQ ID NO: 9442 - protein, 9 aa, Artificial Sequence
  Description of Artificial Sequence: Synthetic peptide
TVLDVGDAY

SEQ ID NO: 9443 - protein, 9 aa, Artificial Sequence
  Description of Artificial Sequence: Synthetic peptide
KQEQGQWTY

SEQ ID NO: 9444 - protein, 10 aa, Artificial Sequence
  Description of Artificial Sequence: Synthetic peptide
GIRIGPGQTF

SEQ ID NO: 9445 - protein, 11 aa, Artificial Sequence
  Description of Artificial Sequence: Synthetic peptide
GAINSSQNETF

SEQ ID NO: 9446 - protein, 10 aa, Artificial Sequence
  Description of Artificial Sequence: Synthetic peptide
SINLGPGQAF

SEQ ID NO: 9447 - protein, 10 aa, Artificial Sequence
  Description of Artificial Sequence: Synthetic peptide
ILKEPVHGVY

SEQ ID NO: 9448 - protein, 11 aa, Artificial Sequence
  Description of Artificial Sequence: Synthetic peptide
SQATNSVTTAM

SEQ ID NO: 9449 - protein, 11 aa, Artificial Sequence
  Description of Artificial Sequence: Synthetic peptide
KSINLGPGQAF

SEQ ID NO: 9450 - protein, 10 aa, Artificial Sequence
  Description of Artificial Sequence: Synthetic peptide
FLNKGLGISY

SEQ ID NO: 9451 - protein, 9 aa, Artificial Sequence
  Description of Artificial Sequence: Synthetic peptide
VQRISTESI

SEQ ID NO: 9452 - protein, 10 aa, Artificial Sequence
  Description of Artificial Sequence: Synthetic peptide
ILKEPVHGAY

SEQ ID NO: 9453 - protein, 9 aa, Artificial Sequence
  Description of Artificial Sequence: Synthetic peptide
IQKQEQGQW

SEQ ID NO: 9454 - protein, 9 aa, Artificial Sequence
  Description of Artificial Sequence: Synthetic peptide
KQIIKIQNF

SEQ ID NO: 9455 - protein, 8 aa, Artificial Sequence
  Description of Artificial Sequence: Synthetic peptide
GQHIYDTY

SEQ ID NO: 9456 - protein, 9 aa, Artificial Sequence
  Description of Artificial Sequence: Synthetic peptide
KQNPELIIY

SEQ ID NO: 9457 - protein, 8 aa, Artificial Sequence
  Description of Artificial Sequence: Synthetic peptide
AVHVASGY

SEQ ID NO: 9458 - protein, 9 aa, Artificial Sequence
  Description of Artificial Sequence: Synthetic peptide
GQGTVSFSF

SEQ ID NO: 9459 - protein, 11 aa, Artificial Sequence
  Description of Artificial Sequence: Synthetic peptide
IQKQGQDQWTY

SEQ ID NO: 9460 - protein, 9 aa, Artificial Sequence
  Description of Artificial Sequence: Synthetic peptide
SSSQVSQNY

SEQ ID NO: 9461 - protein, 9 aa, Artificial Sequence
  Description of Artificial Sequence: Synthetic peptide
FLGAAGSTM

SEQ ID NO: 9462 - protein, 8 aa, Artificial Sequence
  Description of Artificial Sequence: Synthetic peptide
GQMVHQAI

SEQ ID NO: 9463 - protein, 9 aa, Artificial Sequence
  Description of Artificial Sequence: Synthetic peptide
KQISKIQHF

SEQ ID NO: 9464 - protein, 11 aa, Artificial Sequence
  Description of Artificial Sequence: Synthetic peptide
HSIGERIISTY

SEQ ID NO: 9465 - protein, 10 aa, Artificial Sequence
  Description of Artificial Sequence: Synthetic peptide
FTKKGLGVSY

SEQ ID NO: 9466 - protein, 9 aa, Artificial Sequence
  Description of Artificial Sequence: Synthetic peptide
KAILGQVVY

SEQ ID NO: 9467 - protein, 8 aa, Artificial Sequence
  Description of Artificial Sequence: Synthetic peptide
GERIISTY

SEQ ID NO: 9468 - protein, 9 aa, Artificial Sequence
  Description of Artificial Sequence: Synthetic peptide
AGNLWVTVY

SEQ ID NO: 9469 - protein, 9 aa, Artificial Sequence
  Description of Artificial Sequence: Synthetic peptide
KQGQDQWTY

SEQ ID NO: 9470 - protein, 9 aa, Artificial Sequence
  Description of Artificial Sequence: Synthetic peptide
FLGTAGSTM

SEQ ID NO: 9471 - protein, 9 aa, Artificial Sequence
  Description of Artificial Sequence: Synthetic peptide
IQKQGQDQW

SEQ ID NO: 9472 - protein, 9 aa, Artificial Sequence
  Description of Artificial Sequence: Synthetic peptide
ARILAVESY

SEQ ID NO: 9473 - protein, 9 aa, Artificial Sequence
  Description of Artificial Sequence: Synthetic peptide
ALIEICSEL

SEQ ID NO: 9474 - protein, 9 aa, Artificial Sequence
  Description of Artificial Sequence: Synthetic peptide
VTGDIRKAY

SEQ ID NO: 9475 - protein, 8 aa, Artificial Sequence
  Description of Artificial Sequence: Synthetic peptide
GQAFYATY

SEQ ID NO: 9476 - protein, 8 aa, Artificial Sequence
  Description of Artificial Sequence: Synthetic peptide
IQNLVERL

SEQ ID NO: 9477 - protein, 10 aa, Artificial Sequence
  Description of Artificial Sequence: Synthetic peptide
GFLGTAGSTM

SEQ ID NO: 9478 - protein, 9 aa, Artificial Sequence
  Description of Artificial Sequence: Synthetic peptide
GIFPDWQNY

SEQ ID NO: 9479 - protein, 9 aa, Artificial Sequence
  Description of Artificial Sequence: Synthetic peptide
QVPERPVTY

SEQ ID NO: 9480 - protein, 11 aa, Artificial Sequence
  Description of Artificial Sequence: Synthetic peptide
HSIGERILSTY

SEQ ID NO: 9481 - protein, 9 aa, Artificial Sequence
  Description of Artificial Sequence: Synthetic peptide
YQSNPPPSL

SEQ ID NO: 9482 - protein, 9 aa, Artificial Sequence
  Description of Artificial Sequence: Synthetic peptide
DARLVVTTY

SEQ ID NO: 9483 - protein, 9 aa, Artificial Sequence
  Description of Artificial Sequence: Synthetic peptide
TVLDVGDAY

SEQ ID NO: 9484 - protein, 9 aa, Artificial Sequence
  Description of Artificial Sequence: Synthetic peptide
FLGAAGSTM

SEQ ID NO: 9485 - protein, 9 aa, Artificial Sequence
  Description of Artificial Sequence: Synthetic peptide
FLGTAGSTM

SEQ ID NO: 9486 - protein, 10 aa, Artificial Sequence
  Description of Artificial Sequence: Synthetic peptide
FLNKGLGISY

SEQ ID NO: 9487 - protein, 9 aa, Artificial Sequence
  Description of Artificial Sequence: Synthetic peptide
TQACPKVSF

SEQ ID NO: 9488 - protein, 9 aa, Artificial Sequence
  Description of Artificial Sequence: Synthetic peptide
TVGGHQAAM

SEQ ID NO: 9489 - protein, 9 aa, Artificial Sequence
  Description of Artificial Sequence: Synthetic peptide
DIVSPRCEY

SEQ ID NO: 9490 - protein, 9 aa, Artificial Sequence
  Description of Artificial Sequence: Synthetic peptide
DLVNVSENF

SEQ ID NO: 9491 - protein, 10 aa, Artificial Sequence
  Description of Artificial Sequence: Synthetic peptide
FVTKGLGISY

SEQ ID NO: 9492 - protein, 10 aa, Artificial Sequence
  Description of Artificial Sequence: Synthetic peptide
SINLGPGQAF

SEQ ID NO: 9493 - protein, 8 aa, Artificial Sequence
  Description of Artificial Sequence: Synthetic peptide
DNYTELVY

SEQ ID NO: 9494 - protein, 9 aa, Artificial Sequence
  Description of Artificial Sequence: Synthetic peptide
SASSLFDAI

SEQ ID NO: 9495 - protein, 8 aa, Artificial Sequence
  Description of Artificial Sequence: Synthetic peptide
DNYTGLIY

SEQ ID NO: 9496 - protein, 9 aa, Artificial Sequence
  Description of Artificial Sequence: Synthetic peptide
QVPERPVTY

SEQ ID NO: 9497 - protein, 10 aa, Artificial Sequence
  Description of Artificial Sequence: Synthetic peptide
EIAERILGTY

SEQ ID NO: 9498 - protein, 9 aa, Artificial Sequence
  Description of Artificial Sequence: Synthetic peptide
SAEPVPLQL

SEQ ID NO: 9499 - protein, 9 aa, Artificial Sequence
  Description of Artificial Sequence: Synthetic peptide
DIAGTTSTL

SEQ ID NO: 9500 - protein, 10 aa, Artificial Sequence
  Description of Artificial Sequence: Synthetic peptide
EVNIVTDSQY

SEQ ID NO: 9501 - protein, 9 aa, Artificial Sequence
  Description of Artificial Sequence: Synthetic peptide
RQRPGTVSF

SEQ ID NO: 9502 - protein, 9 aa, Artificial Sequence
  Description of Artificial Sequence: Synthetic peptide
TKKGLGVSY

SEQ ID NO: 9503 - protein, 9 aa, Artificial Sequence
  Description of Artificial Sequence: Synthetic peptide
RQRPGTVSF

SEQ ID NO: 9504 - protein, 11 aa, Artificial Sequence
  Description of Artificial Sequence: Synthetic peptide
AKVNIVTDSQY

SEQ ID NO: 9505 - protein, 8 aa, Artificial Sequence
  Description of Artificial Sequence: Synthetic peptide
TKGLGISY

SEQ ID NO: 9506 - protein, 9 aa, Artificial Sequence
  Description of Artificial Sequence: Synthetic peptide
GQKAIGTVL

SEQ ID NO: 9507 - protein, 8 aa, Artificial Sequence
  Description of Artificial Sequence: Synthetic peptide
KKGLGVSY

SEQ ID NO: 9508 - protein, 9 aa, Artificial Sequence
  Description of Artificial Sequence: Synthetic peptide
ITKGLGISY

SEQ ID NO: 9509 - protein, 9 aa, Artificial Sequence
  Description of Artificial Sequence: Synthetic peptide
ARILAVESY

SEQ ID NO: 9510 - protein, 9 aa, Artificial Sequence
  Description of Artificial Sequence: Synthetic peptide
VTKGLGISY

SEQ ID NO: 9511 - protein, 9 aa, Artificial Sequence
  Description of Artificial Sequence: Synthetic peptide
SKIGPENPY

SEQ ID NO: 9512 - protein, 9 aa, Artificial Sequence
  Description of Artificial Sequence: Synthetic peptide
RQGQGTVSF

SEQ ID NO: 9513 - protein, 9 aa, Artificial Sequence
  Description of Artificial Sequence: Synthetic peptide
KQNPEIVIY

SEQ ID NO: 9514 - protein, 8 aa, Artificial Sequence
  Description of Artificial Sequence: Synthetic peptide
YQIYQEQY

SEQ ID NO: 9515 - protein, 9 aa, Artificial Sequence
  Description of Artificial Sequence: Synthetic peptide
ARVLAVESY

SEQ ID NO: 9516 - protein, 9 aa, Artificial Sequence
  Description of Artificial Sequence: Synthetic peptide
AERQGTVSF

SEQ ID NO: 9517 - protein, 8 aa, Artificial Sequence
  Description of Artificial Sequence: Synthetic peptide
GQFIYETY

SEQ ID NO: 9518 - protein, 9 aa, Artificial Sequence
  Description of Artificial Sequence: Synthetic peptide
KQNPEMVIY

SEQ ID NO: 9519 - protein, 8 aa, Artificial Sequence
  Description of Artificial Sequence: Synthetic peptide
GQMVHQAL

SEQ ID NO: 9520 - protein, 8 aa, Artificial Sequence
  Description of Artificial Sequence: Synthetic peptide
HKAIGTVL

SEQ ID NO: 9521 - protein, 8 aa, Artificial Sequence
  Description of Artificial Sequence: Synthetic peptide
NKGLGISY

SEQ ID NO: 9522 - protein, 9 aa, Artificial Sequence
  Description of Artificial Sequence: Synthetic peptide
AKMKHPEYY

SEQ ID NO: 9523 - protein, 9 aa, Artificial Sequence
  Description of Artificial Sequence: Synthetic peptide
KQEQGQWTY

SEQ ID NO: 9524 - protein, 9 aa, Artificial Sequence
  Description of Artificial Sequence: Synthetic peptide
KQNPEMIIY

SEQ ID NO: 9525 - protein, 9 aa, Artificial Sequence
  Description of Artificial Sequence: Synthetic peptide
VKVIEEKAF

SEQ ID NO: 9526 - protein, 9 aa, Artificial Sequence
  Description of Artificial Sequence: Synthetic peptide
TQACPKVSF

SEQ ID NO: 9527 - protein, 9 aa, Artificial Sequence
  Description of Artificial Sequence: Synthetic peptide
QHSRIGITL

SEQ ID NO: 9528 - protein, 9 aa, Artificial Sequence
  Description of Artificial Sequence: Synthetic peptide
GHKAIGTVL

SEQ ID NO: 9529 - protein, 9 aa, Artificial Sequence
  Description of Artificial Sequence: Synthetic peptide
TRIGPGQAL

SEQ ID NO: 9530 - protein, 9 aa, Artificial Sequence
  Description of Artificial Sequence: Synthetic peptide
YQSNPPPSL

SEQ ID NO: 9531 - protein, 9 aa, Artificial Sequence
  Description of Artificial Sequence: Synthetic peptide
THLEGKVIL

SEQ ID NO: 9532 - protein, 9 aa, Artificial Sequence
  Description of Artificial Sequence: Synthetic peptide
THTNDVKQL

SEQ ID NO: 9533 - protein, 9 aa, Artificial Sequence
  Description of Artificial Sequence: Synthetic peptide
HQAISPRTL

SEQ ID NO: 9534 - protein, 9 aa, Artificial Sequence
  Description of Artificial Sequence: Synthetic peptide
EHLKTAVQM

SEQ ID NO: 9535 - protein, 9 aa, Artificial Sequence
  Description of Artificial Sequence: Synthetic peptide
HQALSPRTL

SEQ ID NO: 9536 - protein, 8 aa, Artificial Sequence
  Description of Artificial Sequence: Synthetic peptide
LHQVAQKL

SEQ ID NO: 9537 - protein, 9 aa, Artificial Sequence
  Description of Artificial Sequence: Synthetic peptide
GHQAAMQML

SEQ ID NO: 9538 - protein, 9 aa, Artificial Sequence
  Description of Artificial Sequence: Synthetic peptide
AHTNDVKQL

SEQ ID NO: 9539 - protein, 9 aa, Artificial Sequence
  Description of Artificial Sequence: Synthetic peptide
GQKAIGTVL

SEQ ID NO: 9540 - protein, 9 aa, Artificial Sequence
  Description of Artificial Sequence: Synthetic peptide
THLEGKGIL

SEQ ID NO: 9541 - protein, 9 aa, Artificial Sequence
  Description of Artificial Sequence: Synthetic peptide
MEDPERQVL

SEQ ID NO: 9542 - protein, 9 aa, Artificial Sequence
  Description of Artificial Sequence: Synthetic peptide
HHPLSPRTL

SEQ ID NO: 9543 - protein, 10 aa, Artificial Sequence
  Description of Artificial Sequence: Synthetic peptide
VHHPLSPRTL

SEQ ID NO: 9544 - protein, 9 aa, Artificial Sequence
  Description of Artificial Sequence: Synthetic peptide
IHSIGERIL

SEQ ID NO: 9545 - protein, 9 aa, Artificial Sequence
  Description of Artificial Sequence: Synthetic peptide
FQQGKAREL

SEQ ID NO: 9546 - protein, 10 aa, Artificial Sequence
  Description of Artificial Sequence: Synthetic peptide
SHNGRPGNFL

SEQ ID NO: 9547 - protein, 9 aa, Artificial Sequence
  Description of Artificial Sequence: Synthetic peptide
SQIYPGIKV

SEQ ID NO: 9548 - protein, 8 aa, Artificial Sequence
  Description of Artificial Sequence: Synthetic peptide
THLEGKVI

SEQ ID NO: 9549 - protein, 9 aa, Artificial Sequence
  Description of Artificial Sequence: Synthetic peptide
TVLDVGDAY

SEQ ID NO: 9550 - protein, 9 aa, Artificial Sequence
  Description of Artificial Sequence: Synthetic peptide
TINEEAAEW

SEQ ID NO: 9551 - protein, 9 aa, Artificial Sequence
  Description of Artificial Sequence: Synthetic peptide
IQKQEQGQW

SEQ ID NO: 9552 - protein, 8 aa, Artificial Sequence
  Description of Artificial Sequence: Synthetic peptide
NETPGIRY

SEQ ID NO: 9553 - protein, 8 aa, Artificial Sequence
  Description of Artificial Sequence: Synthetic peptide
GERIISTY

SEQ ID NO: 9554 - protein, 9 aa, Artificial Sequence
  Description of Artificial Sequence: Synthetic peptide
SEFNLPPVV

SEQ ID NO: 9555 - protein, 8 aa, Artificial Sequence
  Description of Artificial Sequence: Synthetic peptide
TEVIPLTA

SEQ ID NO: 9556 - protein, 11 aa, Artificial Sequence
  Description of Artificial Sequence: Synthetic peptide
LEVNIVTDSQY

SEQ ID NO: 9557 - protein, 8 aa, Artificial Sequence
  Description of Artificial Sequence: Synthetic peptide
SEEIKSLY

SEQ ID NO: 9558 - protein, 8 aa, Artificial Sequence
  Description of Artificial Sequence: Synthetic peptide
PEIVIYQY

SEQ ID NO: 9559 - protein, 9 aa, Artificial Sequence
  Description of Artificial Sequence: Synthetic peptide
DEVGFPVRP

SEQ ID NO: 9560 - protein, 8 aa, Artificial Sequence
  Description of Artificial Sequence: Synthetic peptide
LENVTENF

SEQ ID NO: 9561 - protein, 8 aa, Artificial Sequence
  Description of Artificial Sequence: Synthetic peptide
IEIIQRAF

SEQ ID NO: 9562 - protein, 8 aa, Artificial Sequence
  Description of Artificial Sequence: Synthetic peptide
PEMVIYQY

SEQ ID NO: 9563 - protein, 8 aa, Artificial Sequence
  Description of Artificial Sequence: Synthetic peptide
PEMIIYQY

SEQ ID NO: 9564 - protein, 8 aa, Artificial Sequence
  Description of Artificial Sequence: Synthetic peptide
DEELLQAV

SEQ ID NO: 9565 - protein, 8 aa, Artificial Sequence
  Description of Artificial Sequence: Synthetic peptide
DEDLLKAV

SEQ ID NO: 9566 - protein, 9 aa, Artificial Sequence
  Description of Artificial Sequence: Synthetic peptide
ARILAVESY

SEQ ID NO: 9567 - protein, 11 aa, Artificial Sequence
  Description of Artificial Sequence: Synthetic peptide
TRNSSQVSQNY

SEQ ID NO: 9568 - protein, 9 aa, Artificial Sequence
  Description of Artificial Sequence: Synthetic peptide
ARVLAVESY

SEQ ID NO: 9569 - protein, 9 aa, Artificial Sequence
  Description of Artificial Sequence: Synthetic peptide
ARVLAVERY

SEQ ID NO: 9570 - protein, 10 aa, Artificial Sequence
  Description of Artificial Sequence: Synthetic peptide
TRIGPGQALF

SEQ ID NO: 9571 - protein, 10 aa, Artificial Sequence
  Description of Artificial Sequence: Synthetic peptide
VRQGYSPLSF

SEQ ID NO: 9572 - protein, 9 aa, Artificial Sequence
  Description of Artificial Sequence: Synthetic peptide
ARILAVERY

SEQ ID NO: 9573 - protein, 9 aa, Artificial Sequence
  Description of Artificial Sequence: Synthetic peptide
TRIVGLLGH

SEQ ID NO: 9574 - protein, 10 aa, Artificial Sequence
  Description of Artificial Sequence: Synthetic peptide
FTAEVTGDIR

SEQ ID NO: 9575 - protein, 11 aa, Artificial Sequence
  Description of Artificial Sequence: Synthetic peptide
LIEESQIQQEK

SEQ ID NO: 9576 - protein, 10 aa, Artificial Sequence
  Description of Artificial Sequence: Synthetic peptide
ERQGQGTVSF

SEQ ID NO: 9577 - protein, 10 aa, Artificial Sequence
  Description of Artificial Sequence: Synthetic peptide
EIDNYTELVY

SEQ ID NO: 9578 - protein, 9 aa, Artificial Sequence
  Description of Artificial Sequence: Synthetic peptide
ALTALVTPR

SEQ ID NO: 9579 - protein, 9 aa, Artificial Sequence
  Description of Artificial Sequence: Synthetic peptide
SRIGPENPY

SEQ ID NO: 9580 - protein, 11 aa, Artificial Sequence
  Description of Artificial Sequence: Synthetic peptide
GINNSTNETFR

SEQ ID NO: 9581 - protein, 10 aa, Artificial Sequence
  Description of Artificial Sequence: Synthetic peptide
GNNSQVSQNY

SEQ ID NO: 9582 - protein, 11 aa, Artificial Sequence
  Description of Artificial Sequence: Synthetic peptide
KALTEVIPLTK

SEQ ID NO: 9583 - protein, 11 aa, Artificial Sequence
  Description of Artificial Sequence: Synthetic peptide
KEAELELAENR

SEQ ID NO: 9584 - protein, 11 aa, Artificial Sequence
  Description of Artificial Sequence: Synthetic peptide
QRISTESIVIW

SEQ ID NO: 9585 - protein, 9 aa, Artificial Sequence
  Description of Artificial Sequence: Synthetic peptide
ILGDIVSPR

SEQ ID NO: 9586 - protein, 9 aa, Artificial Sequence
  Description of Artificial Sequence: Synthetic peptide
ARLVVTTYW

SEQ ID NO: 9587 - protein, 9 aa, Artificial Sequence
  Description of Artificial Sequence: Synthetic peptide
SRIGITLQR

SEQ ID NO: 9588 - protein, 11 aa, Artificial Sequence
  Description of Artificial Sequence: Synthetic peptide
KALTEIIPLTK

SEQ ID NO: 9589 - protein, 10 aa, Artificial Sequence
  Description of Artificial Sequence: Synthetic peptide
EALDLSHFLK

SEQ ID NO: 9590 - protein, 11 aa, Artificial Sequence
  Description of Artificial Sequence: Synthetic peptide
TAIAVAEGTDR

SEQ ID NO: 9591 - protein, 10 aa, Artificial Sequence
  Description of Artificial Sequence: Synthetic peptide
IRIGPGQTFF

SEQ ID NO: 9592 - protein, 11 aa, Artificial Sequence
  Description of Artificial Sequence: Synthetic peptide
GFGEEITPSQK

SEQ ID NO: 9593 - protein, 11 aa, Artificial Sequence
  Description of Artificial Sequence: Synthetic peptide
LIEESQVQQEK

SEQ ID NO: 9594 - protein, 9 aa, Artificial Sequence
  Description of Artificial Sequence: Synthetic peptide
QAHQVPIPK

SEQ ID NO: 9595 - protein, 9 aa, Artificial Sequence
  Description of Artificial Sequence: Synthetic peptide
SRIGITLQR

SEQ ID NO: 9596 - protein, 9 aa, Artificial Sequence
  Description of Artificial Sequence: Synthetic peptide
SRIGIIRQR

SEQ ID NO: 9597 - protein, 9 aa, Artificial Sequence
  Description of Artificial Sequence: Synthetic peptide
SRIGITRQR

SEQ ID NO: 9598 - protein, 9 aa, Artificial Sequence
  Description of Artificial Sequence: Synthetic peptide
GRWPVKVVH

SEQ ID NO: 9599 - protein, 9 aa, Artificial Sequence
  Description of Artificial Sequence: Synthetic peptide
ARILAVESY

SEQ ID NO: 9600 - protein, 9 aa, Artificial Sequence
  Description of Artificial Sequence: Synthetic peptide
SRIGINRQR

SEQ ID NO: 9601 - protein, 9 aa, Artificial Sequence
  Description of Artificial Sequence: Synthetic peptide
ARVLAVERY

SEQ ID NO: 9602 - protein, 9 aa, Artificial Sequence
  Description of Artificial Sequence: Synthetic peptide
ARVLAVESY

SEQ ID NO: 9603 - protein, 9 aa, Artificial Sequence
  Description of Artificial Sequence: Synthetic peptide
SRSIIGQAH

SEQ ID NO: 9604 - protein, 9 aa, Artificial Sequence
  Description of Artificial Sequence: Synthetic peptide
CRIKQIIKM

SEQ ID NO: 9605 - protein, 10 aa, Artificial Sequence
  Description of Artificial Sequence: Synthetic peptide
TRIGPGQALF

SEQ ID NO: 9606 - protein, 9 aa, Artificial Sequence
  Description of Artificial Sequence: Synthetic peptide
ARILAVERY

SEQ ID NO: 9607 - protein, 11 aa, Artificial Sequence
  Description of Artificial Sequence: Synthetic peptide
TRNSSQVSQNY

SEQ ID NO: 9608 - protein, 9 aa, Artificial Sequence
  Description of Artificial Sequence: Synthetic peptide
GRAVLHIPR

SEQ ID NO: 9609 - protein, 9 aa, Artificial Sequence
  Description of Artificial Sequence: Synthetic peptide
TRIVGLLGH

SEQ ID NO: 9610 - protein, 9 aa, Artificial Sequence
  Description of Artificial Sequence: Synthetic peptide
SRIGPENPY

SEQ ID NO: 9611 - protein, 11 aa, Artificial Sequence
  Description of Artificial Sequence: Synthetic peptide
IPAETGQETAY

SEQ ID NO: 9612 - protein, 9 aa, Artificial Sequence
  Description of Artificial Sequence: Synthetic peptide
EPIVGAETF

SEQ ID NO: 9613 - protein, 9 aa, Artificial Sequence
  Description of Artificial Sequence: Synthetic peptide
EPIIGAETF

SEQ ID NO: 9614 - protein, 11 aa, Artificial Sequence
  Description of Artificial Sequence: Synthetic peptide
IPSETGQETAY

SEQ ID NO: 9615 - protein, 9 aa, Artificial Sequence
  Description of Artificial Sequence: Synthetic peptide
NPEMIIYQY

SEQ ID NO: 9616 - protein, 9 aa, Artificial Sequence
  Description of Artificial Sequence: Synthetic peptide
NPEMVIYQY

SEQ ID NO: 9617 - protein, 9 aa, Artificial Sequence
  Description of Artificial Sequence: Synthetic peptide
NPELIIYSY

SEQ ID NO: 9618 - protein, 9 aa, Artificial Sequence
  Description of Artificial Sequence: Synthetic peptide
NPEIVIYQY

SEQ ID NO: 9619 - protein, 10 aa, Artificial Sequence
  Description of Artificial Sequence: Synthetic peptide
TPIGLGQSLY

SEQ ID NO: 9620 - protein, 9 aa, Artificial Sequence
  Description of Artificial Sequence: Synthetic peptide
TPIGLGQSL

SEQ ID NO: 9621 - protein, 9 aa, Artificial Sequence
  Description of Artificial Sequence: Synthetic peptide
TVLDVGDAY

SEQ ID NO: 9622 - protein, 9 aa, Artificial Sequence
  Description of Artificial Sequence: Synthetic peptide
DPEITTHSF

SEQ ID NO: 9623 - protein, 8 aa, Artificial Sequence
  Description of Artificial Sequence: Synthetic peptide
TPGPGIRY

SEQ ID NO: 9624 - protein, 11 aa, Artificial Sequence
  Description of Artificial Sequence: Synthetic peptide
VPIDKKNNNSY

SEQ ID NO: 9625 - protein, 9 aa, Artificial Sequence
  Description of Artificial Sequence: Synthetic peptide
DARLVVTTY

SEQ ID NO: 9626 - protein, 9 aa, Artificial Sequence
  Description of Artificial Sequence: Synthetic peptide
PPVPVGEIY

SEQ ID NO: 9627 - protein, 10 aa, Artificial Sequence
  Description of Artificial Sequence: Synthetic peptide
VPLDEDFRKY

SEQ ID NO: 9628 - protein, 9 aa, Artificial Sequence
  Description of Artificial Sequence: Synthetic peptide
PPIPVGEIY

SEQ ID NO: 9629 - protein, 10 aa, Artificial Sequence
  Description of Artificial Sequence: Synthetic peptide
NPPVPVGEIY

SEQ ID NO: 9630 - protein, 8 aa, Artificial Sequence
  Description of Artificial Sequence: Synthetic peptide
TPGPGTRY

SEQ ID NO: 9631 - protein, 9 aa, Artificial Sequence
  Description of Artificial Sequence: Synthetic peptide
HPVQAGPVA

SEQ ID NO: 9632 - protein, 10 aa, Artificial Sequence
  Description of Artificial Sequence: Synthetic peptide
NPPIPVGEIY

SEQ ID NO: 9633 - protein, 9 aa, Artificial Sequence
  Description of Artificial Sequence: Synthetic peptide
SPAIFQSSM

SEQ ID NO: 9634 - protein, 9 aa, Artificial Sequence
  Description of Artificial Sequence: Synthetic peptide
EAVDLSHFL

SEQ ID NO: 9635 - protein, 8 aa, Artificial Sequence
  Description of Artificial Sequence: Synthetic peptide
VPERPVTY

SEQ ID NO: 9636 - protein, 9 aa, Artificial Sequence
  Description of Artificial Sequence: Synthetic peptide
IPLTEEAEL

SEQ ID NO: 9637 - protein, 9 aa, Artificial Sequence
  Description of Artificial Sequence: Synthetic peptide
DPNPQEIAL

SEQ ID NO: 9638 - protein, 8 aa, Artificial Sequence
  Description of Artificial Sequence: Synthetic peptide
NANTAIMM

SEQ ID NO: 9639 - protein, 9 aa, Artificial Sequence
  Description of Artificial Sequence: Synthetic peptide
SAEPVPLQL

SEQ ID NO: 9640 - protein, 9 aa, Artificial Sequence
  Description of Artificial Sequence: Synthetic peptide
IPLTKEAEL

SEQ ID NO: 9641 - protein, 9 aa, Artificial Sequence
  Description of Artificial Sequence: Synthetic peptide
FPISPIETV

SEQ ID NO: 9642 - protein, 9 aa, Artificial Sequence
  Description of Artificial Sequence: Synthetic peptide
DPDPQELVL

SEQ ID NO: 9643 - protein, 9 aa, Artificial Sequence
  Description of Artificial Sequence: Synthetic peptide
IPLTEEAEL

SEQ ID NO: 9644 - protein, 9 aa, Artificial Sequence
  Description of Artificial Sequence: Synthetic peptide
DPNPQEIAL

SEQ ID NO: 9645 - protein, 9 aa, Artificial Sequence
  Description of Artificial Sequence: Synthetic peptide
QPDKSESEL

SEQ ID NO: 9646 - protein, 9 aa, Artificial Sequence
  Description of Artificial Sequence: Synthetic peptide
IPLTKEAEL

SEQ ID NO: 9647 - protein, 8 aa, Artificial Sequence
  Description of Artificial Sequence: Synthetic peptide
TPDETITL

SEQ ID NO: 9648 - protein, 9 aa, Artificial Sequence
  Description of Artificial Sequence: Synthetic peptide
DPNPQEIKL

SEQ ID NO: 9649 - protein, 9 aa, Artificial Sequence
  Description of Artificial Sequence: Synthetic peptide
IPLTAEAEL

SEQ ID NO: 9650 - protein, 9 aa, Artificial Sequence
  Description of Artificial Sequence: Synthetic peptide
SAEPVPLQL

SEQ ID NO: 9651 - protein, 9 aa, Artificial Sequence
  Description of Artificial Sequence: Synthetic peptide
TPIGLGQSL

SEQ ID NO: 9652 - protein, 9 aa, Artificial Sequence
  Description of Artificial Sequence: Synthetic peptide
YSTQIDPGL

SEQ ID NO: 9653 - protein, 10 aa, Artificial Sequence
  Description of Artificial Sequence: Synthetic peptide
SPSSGGDPEI

SEQ ID NO: 9654 - protein, 9 aa, Artificial Sequence
  Description of Artificial Sequence: Synthetic peptide
MEDPERQVL

SEQ ID NO: 9655 - protein, 9 aa, Artificial Sequence
  Description of Artificial Sequence: Synthetic peptide
HPVQAGPVA

SEQ ID NO: 9656 - protein, 11 aa, Artificial Sequence
  Description of Artificial Sequence: Synthetic peptide
IPLTEEAELEL

SEQ ID NO: 9657 - protein, 9 aa, Artificial Sequence
  Description of Artificial Sequence: Synthetic peptide
FPQGKAGEL

SEQ ID NO: 9658 - protein, 9 aa, Artificial Sequence
  Description of Artificial Sequence: Synthetic peptide
DSDNTSYRL

SEQ ID NO: 9659 - protein, 9 aa, Artificial Sequence
  Description of Artificial Sequence: Synthetic peptide
DPNPQEMDL

SEQ ID NO: 9660 - protein, 9 aa, Artificial Sequence
  Description of Artificial Sequence: Synthetic peptide
EAVDLSHFL

SEQ ID NO: 9661 - protein, 9 aa, Artificial Sequence
  Description of Artificial Sequence: Synthetic peptide
FPISPIETV

SEQ ID NO: 9662 - protein, 9 aa, Artificial Sequence
  Description of Artificial Sequence: Synthetic peptide
TPIGLGQSL

SEQ ID NO: 9663 - protein, 9 aa, Artificial Sequence
  Description of Artificial Sequence: Synthetic peptide
IPLTEEAEL

SEQ ID NO: 9664 - protein, 9 aa, Artificial Sequence
  Description of Artificial Sequence: Synthetic peptide
DPNPQEIAL

SEQ ID NO: 9665 - protein, 9 aa, Artificial Sequence
  Description of Artificial Sequence: Synthetic peptide
HPVQAGPVA

SEQ ID NO: 9666 - protein, 9 aa, Artificial Sequence
  Description of Artificial Sequence: Synthetic peptide
IPLTKEAEL

SEQ ID NO: 9667 - protein, 9 aa, Artificial Sequence
  Description of Artificial Sequence: Synthetic peptide
IPLTAEAEL

SEQ ID NO: 9668 - protein, 11 aa, Artificial Sequence
  Description of Artificial Sequence: Synthetic peptide
IPLTEEAELEL

SEQ ID NO: 9669 - protein, 9 aa, Artificial Sequence
  Description of Artificial Sequence: Synthetic peptide
DPDPQELVL

SEQ ID NO: 9670 - protein, 9 aa, Artificial Sequence
  Description of Artificial Sequence: Synthetic peptide
FPISPIETV

SEQ ID NO: 9671 - protein, 9 aa, Artificial Sequence
  Description of Artificial Sequence: Synthetic peptide
DPNPQEIKL

SEQ ID NO: 9672 - protein, 9 aa, Artificial Sequence
  Description of Artificial Sequence: Synthetic peptide
FPQGKAGEL

SEQ ID NO: 9673 - protein, 9 aa, Artificial Sequence
  Description of Artificial Sequence: Synthetic peptide
HPVHAGPVA

SEQ ID NO: 9674 - protein, 9 aa, Artificial Sequence
  Description of Artificial Sequence: Synthetic peptide
SAEPVPLQL

SEQ ID NO: 9675 - protein, 9 aa, Artificial Sequence
  Description of Artificial Sequence: Synthetic peptide
YPSASLKSL

SEQ ID NO: 9676 - protein, 8 aa, Artificial Sequence
  Description of Artificial Sequence: Synthetic peptide
TPDETITL

SEQ ID NO: 9677 - protein, 9 aa, Artificial Sequence
  Description of Artificial Sequence: Synthetic peptide
EAVDLSHFL

SEQ ID NO: 9678 - protein, 9 aa, Artificial Sequence
  Description of Artificial Sequence: Synthetic peptide
YSTQIDPGL

SEQ ID NO: 9679 - protein, 9 aa, Artificial Sequence
  Description of Artificial Sequence: Synthetic peptide
TPQDLNTML

SEQ ID NO: 9680 - protein, 9 aa, Artificial Sequence
  Description of Artificial Sequence: Synthetic peptide
FPISPIATV

SEQ ID NO: 9681 - protein, 11 aa, Artificial Sequence
  Description of Artificial Sequence: Synthetic peptide
IPLTAEAELEL

SEQ ID NO: 9682 - protein, 10 aa, Artificial Sequence
  Description of Artificial Sequence: Synthetic peptide
VPTDPDPQEL

SEQ ID NO: 9683 - protein, 9 aa, Artificial Sequence
  Description of Artificial Sequence: Synthetic peptide
IVTDSQYAL

SEQ ID NO: 9684 - protein, 10 aa, Artificial Sequence
  Description of Artificial Sequence: Synthetic peptide
SPIETVPVKL

SEQ ID NO: 9685 - protein, 9 aa, Artificial Sequence
  Description of Artificial Sequence: Synthetic peptide
EPIVGAETF

SEQ ID NO: 9686 - protein, 10 aa, Artificial Sequence
  Description of Artificial Sequence: Synthetic peptide
NANPDCKTIL

SEQ ID NO: 9687 - protein, 9 aa, Artificial Sequence
  Description of Artificial Sequence: Synthetic peptide
TAGMNAAIM

SEQ ID NO: 9688 - protein, 9 aa, Artificial Sequence
  Description of Artificial Sequence: Synthetic peptide
EPIGLAPTA

SEQ ID NO: 9689 - protein, 9 aa, Artificial Sequence
  Description of Artificial Sequence: Synthetic peptide
HPVHAGPIA

SEQ ID NO: 9690 - protein, 9 aa, Artificial Sequence
  Description of Artificial Sequence: Synthetic peptide
EPIIGAETF

SEQ ID NO: 9691 - protein, 10 aa, Artificial Sequence
  Description of Artificial Sequence: Synthetic peptide
SPSSGGDPEI

SEQ ID NO: 9692 - protein, 11 aa, Artificial Sequence
  Description of Artificial Sequence: Synthetic peptide
TPLEITAIAAL

SEQ ID NO: 9693 - protein, 11 aa, Artificial Sequence
  Description of Artificial Sequence: Synthetic peptide
IPLTKEAELEL

SEQ ID NO: 9694 - protein, 8 aa, Artificial Sequence
  Description of Artificial Sequence: Synthetic peptide
NANTAIMM

SEQ ID NO: 9695 - protein, 9 aa, Artificial Sequence
  Description of Artificial Sequence: Synthetic peptide
QPDKSESEL

SEQ ID NO: 9696 - protein, 9 aa, Artificial Sequence
  Description of Artificial Sequence: Synthetic peptide
MEDPERQVL

SEQ ID NO: 9697 - protein, 9 aa, Artificial Sequence
  Description of Artificial Sequence: Synthetic peptide
SAVSLFNTI

SEQ ID NO: 9698 - protein, 11 aa, Artificial Sequence
  Description of Artificial Sequence: Synthetic peptide
IPAETGQETAY

SEQ ID NO: 9699 - protein, 11 aa, Artificial Sequence
  Description of Artificial Sequence: Synthetic peptide
IPSETGQETAY

SEQ ID NO: 9700 - protein, 9 aa, Artificial Sequence
  Description of Artificial Sequence: Synthetic peptide
EPIVGAETF

SEQ ID NO: 9701 - protein, 9 aa, Artificial Sequence
  Description of Artificial Sequence: Synthetic peptide
IPLTEEAEL

SEQ ID NO: 9702 - protein, 9 aa, Artificial Sequence
  Description of Artificial Sequence: Synthetic peptide
DPEITTHSF

SEQ ID NO: 9703 - protein, 9 aa, Artificial Sequence
  Description of Artificial Sequence: Synthetic peptide
EPIIGAETF

SEQ ID NO: 9704 - protein, 9 aa, Artificial Sequence
  Description of Artificial Sequence: Synthetic peptide
NPEIVIYQY

SEQ ID NO: 9705 - protein, 11 aa, Artificial Sequence
  Description of Artificial Sequence: Synthetic peptide
TPQVPERPVTY

SEQ ID NO: 9706 - protein, 9 aa, Artificial Sequence
  Description of Artificial Sequence: Synthetic peptide
NPEMVIYQY

SEQ ID NO: 9707 - protein, 9 aa, Artificial Sequence
  Description of Artificial Sequence: Synthetic peptide
DPDPQELVL

SEQ ID NO: 9708 - protein, 9 aa, Artificial Sequence
  Description of Artificial Sequence: Synthetic peptide
IPLTKEAEL

SEQ ID NO: 9709 - protein, 10 aa, Artificial Sequence
  Description of Artificial Sequence: Synthetic peptide
VPLDEDFRKY

SEQ ID NO: 9710 - protein, 9 aa, Artificial Sequence
  Description of Artificial Sequence: Synthetic peptide
NPELIIYSY

SEQ ID NO: 9711 - protein, 9 aa, Artificial Sequence
  Description of Artificial Sequence: Synthetic peptide
NPEMIIYQY

SEQ ID NO: 9712 - protein, 9 aa, Artificial Sequence
  Description of Artificial Sequence: Synthetic peptide
TVLDVGDAY

SEQ ID NO: 9713 - protein, 8 aa, Artificial Sequence
  Description of Artificial Sequence: Synthetic peptide
TPDETITL

SEQ ID NO: 9714 - protein, 10 aa, Artificial Sequence
  Description of Artificial Sequence: Synthetic peptide
NPPVPVGEIY

SEQ ID NO: 9715 - protein, 11 aa, Artificial Sequence
  Description of Artificial Sequence: Synthetic peptide
IPLTEEAELEL

SEQ ID NO: 9716 - protein, 10 aa, Artificial Sequence
  Description of Artificial Sequence: Synthetic peptide
NPPIPVGEIY

SEQ ID NO: 9717 - protein, 9 aa, Artificial Sequence
  Description of Artificial Sequence: Synthetic peptide
TPIGLGQSL

SEQ ID NO: 9718 - protein, 8 aa, Artificial Sequence
  Description of Artificial Sequence: Synthetic peptide
TPGPGIRY

SEQ ID NO: 9719 - protein, 9 aa, Artificial Sequence
  Description of Artificial Sequence: Synthetic peptide
DPNPQEIAL

SEQ ID NO: 9720 - protein, 9 aa, Artificial Sequence
  Description of Artificial Sequence: Synthetic peptide
IPLTEEAEL

SEQ ID NO: 9721 - protein, 9 aa, Artificial Sequence
  Description of Artificial Sequence: Synthetic peptide
DPDPQELVL

SEQ ID NO: 9722 - protein, 9 aa, Artificial Sequence
  Description of Artificial Sequence: Synthetic peptide
DPNPQEIAL

SEQ ID NO: 9723 - protein, 9 aa, Artificial Sequence
  Description of Artificial Sequence: Synthetic peptide
IPLTKEAEL

SEQ ID NO: 9724 - protein, 9 aa, Artificial Sequence
  Description of Artificial Sequence: Synthetic peptide
DPNPQEIKL

SEQ ID NO: 9725 - protein, 8 aa, Artificial Sequence
  Description of Artificial Sequence: Synthetic peptide
TPDETITL

SEQ ID NO: 9726 - protein, 9 aa, Artificial Sequence
  Description of Artificial Sequence: Synthetic peptide
QPDKSESEL

SEQ ID NO: 9727 - protein, 9 aa, Artificial Sequence
  Description of Artificial Sequence: Synthetic peptide
IPLTAEAEL

SEQ ID NO: 9728 - protein, 9 aa, Artificial Sequence
  Description of Artificial Sequence: Synthetic peptide
TPIGLGQSL

SEQ ID NO: 9729 - protein, 11 aa, Artificial Sequence
  Description of Artificial Sequence: Synthetic peptide
IPLTEEAELEL

SEQ ID NO: 9730 - protein, 9 aa, Artificial Sequence
  Description of Artificial Sequence: Synthetic peptide
SAEPVPLQL

SEQ ID NO: 9731 - protein, 10 aa, Artificial Sequence
  Description of Artificial Sequence: Synthetic peptide
SPSSGGDPEI

SEQ ID NO: 9732 - protein, 9 aa, Artificial Sequence
  Description of Artificial Sequence: Synthetic peptide
FPQGKAGEL

SEQ ID NO: 9733 - protein, 9 aa, Artificial Sequence
  Description of Artificial Sequence: Synthetic peptide
HPVQAGPVA

SEQ ID NO: 9734 - protein, 9 aa, Artificial Sequence
  Description of Artificial Sequence: Synthetic peptide
YSTQIDPGL

SEQ ID NO: 9735 - protein, 9 aa, Artificial Sequence
  Description of Artificial Sequence: Synthetic peptide
DPNPQEMDL

SEQ ID NO: 9736 - protein, 9 aa, Artificial Sequence
  Description of Artificial Sequence: Synthetic peptide
MEDPERQVL

SEQ ID NO: 9737 - protein, 11 aa, Artificial Sequence
  Description of Artificial Sequence: Synthetic peptide
IPLTAEAELEL

SEQ ID NO: 9738 - protein, 9 aa, Artificial Sequence
  Description of Artificial Sequence: Synthetic peptide
FPISPIETV

SEQ ID NO: 9739 - protein, 9 aa, Artificial Sequence
  Description of Artificial Sequence: Synthetic peptide
EAVDLSHFL

SEQ ID NO: 9740 - protein, 9 aa, Artificial Sequence
  Description of Artificial Sequence: Synthetic peptide
DSDNTSYRL

SEQ ID NO: 9741 - protein, 9 aa, Artificial Sequence
  Description of Artificial Sequence: Synthetic peptide
HPVHAGPVA

SEQ ID NO: 9742 - protein, 10 aa, Artificial Sequence
  Description of Artificial Sequence: Synthetic peptide
VPTDPDPQEL

SEQ ID NO: 9743 - protein, 9 aa, Artificial Sequence
  Description of Artificial Sequence: Synthetic peptide
DPEITTHSF

SEQ ID NO: 9744 - protein, 9 aa, Artificial Sequence
  Description of Artificial Sequence: Synthetic peptide
EPIVGAETF

SEQ ID NO: 9745 - protein, 9 aa, Artificial Sequence
  Description of Artificial Sequence: Synthetic peptide
RDLERHGAI

SEQ ID NO: 9746 - protein, 8 aa, Artificial Sequence
  Description of Artificial Sequence: Synthetic peptide
SDLQTTEL

SEQ ID NO: 9747 - protein, 8 aa, Artificial Sequence
  Description of Artificial Sequence: Synthetic peptide
SDNTSYRL

SEQ ID NO: 9748 - protein, 8 aa, Artificial Sequence
  Description of Artificial Sequence: Synthetic peptide
SEELKSLF

SEQ ID NO: 9749 - protein, 8 aa, Artificial Sequence
  Description of Artificial Sequence: Synthetic peptide
LDNVTENF

SEQ ID NO: 9750 - protein, 8 aa, Artificial Sequence
  Description of Artificial Sequence: Synthetic peptide
AEHLKTAV

SEQ ID NO: 9751 - protein, 8 aa, Artificial Sequence
  Description of Artificial Sequence: Synthetic peptide
YESPHPKI

SEQ ID NO: 9752 - protein, 9 aa, Artificial Sequence
  Description of Artificial Sequence: Synthetic peptide
KELYPSASL

SEQ ID NO: 9753 - protein, 9 aa, Artificial Sequence
  Description of Artificial Sequence: Synthetic peptide
AERQGTVSF

SEQ ID NO: 9754 - protein, 8 aa, Artificial Sequence
  Description of Artificial Sequence: Synthetic peptide
ADQLIHIY

SEQ ID NO: 9755 - protein, 8 aa, Artificial Sequence
  Description of Artificial Sequence: Synthetic peptide
KEATTTLF

SEQ ID NO: 9756 - protein, 8 aa, Artificial Sequence
  Description of Artificial Sequence: Synthetic peptide
LENVTENF

SEQ ID NO: 9757 - protein, 8 aa, Artificial Sequence
  Description of Artificial Sequence: Synthetic peptide
ADNLWVTV

SEQ ID NO: 9758 - protein, 9 aa, Artificial Sequence
  Description of Artificial Sequence: Synthetic peptide
QHSRIGITL

SEQ ID NO: 9759 - protein, 9 aa, Artificial Sequence
  Description of Artificial Sequence: Synthetic peptide
THTNDVKQL

SEQ ID NO: 9760 - protein, 9 aa, Artificial Sequence
  Description of Artificial Sequence: Synthetic peptide
AHLNESVKI

SEQ ID NO: 9761 - protein, 9 aa, Artificial Sequence
  Description of Artificial Sequence: Synthetic peptide
IHTDNGSNF

SEQ ID NO: 9762 - protein, 11 aa, Artificial Sequence
  Description of Artificial Sequence: Synthetic peptide
TQIDPGLADQL

SEQ ID NO: 9763 - protein, 9 aa, Artificial Sequence
  Description of Artificial Sequence: Synthetic peptide
VHTDNGSNF

SEQ ID NO: 9764 - protein, 11 aa, Artificial Sequence
  Description of Artificial Sequence: Synthetic peptide
TQVDPGLADQL

SEQ ID NO: 9765 - protein, 9 aa, Artificial Sequence
  Description of Artificial Sequence: Synthetic peptide
THLEGKVIL

SEQ ID NO: 9766 - protein, 9 aa, Artificial Sequence
  Description of Artificial Sequence: Synthetic peptide
YQSNPPPSL

SEQ ID NO: 9767 - protein, 9 aa, Artificial Sequence
  Description of Artificial Sequence: Synthetic peptide
TRIGPGQAL

SEQ ID NO: 9768 - protein, 10 aa, Artificial Sequence
  Description of Artificial Sequence: Synthetic peptide
TQISVESPAI

SEQ ID NO: 9769 - protein, 10 aa, Artificial Sequence
  Description of Artificial Sequence: Synthetic peptide
HHAPWNVDDI

SEQ ID NO: 9770 - protein, 9 aa, Artificial Sequence
  Description of Artificial Sequence: Synthetic peptide
TQDFWEVQL

SEQ ID NO: 9771 - protein, 9 aa, Artificial Sequence
  Description of Artificial Sequence: Synthetic peptide
VLDNVTENF

SEQ ID NO: 9772 - protein, 10 aa, Artificial Sequence
  Description of Artificial Sequence: Synthetic peptide
HHAPWDIDDL

SEQ ID NO: 9773 - protein, 9 aa, Artificial Sequence
  Description of Artificial Sequence: Synthetic peptide
MEDPERQVL

SEQ ID NO: 9774 - protein, 9 aa, Artificial Sequence
  Description of Artificial Sequence: Synthetic peptide
GHQAAMQML

SEQ ID NO: 9775 - protein, 9 aa, Artificial Sequence
  Description of Artificial Sequence: Synthetic peptide
TQGVGHPQI

SEQ ID NO: 9776 - protein, 10 aa, Artificial Sequence
  Description of Artificial Sequence: Synthetic peptide
ERQGQGTVSF

SEQ ID NO: 9777 - protein, 9 aa, Artificial Sequence
  Description of Artificial Sequence: Synthetic peptide
AHTNDVKQL

SEQ ID NO: 9778 - protein, 10 aa, Artificial Sequence
  Description of Artificial Sequence: Synthetic peptide
LQDSGAKVNI

SEQ ID NO: 9779 - protein, 9 aa, Artificial Sequence
  Description of Artificial Sequence: Synthetic peptide
EHLKTAVQM

SEQ ID NO: 9780 - protein, 9 aa, Artificial Sequence
  Description of Artificial Sequence: Synthetic peptide
QDSGLEVNI

SEQ ID NO: 9781 - protein, 9 aa, Artificial Sequence
  Description of Artificial Sequence: Synthetic peptide
TQGVGSHQI

SEQ ID NO: 9782 - protein, 10 aa, Artificial Sequence
  Description of Artificial Sequence: Synthetic peptide
TRIGPGQALF

SEQ ID NO: 9783 - protein, 9 aa, Artificial Sequence
  Description of Artificial Sequence: Synthetic peptide
TRIGPGQAL

SEQ ID NO: 9784 - protein, 9 aa, Artificial Sequence
  Description of Artificial Sequence: Synthetic peptide
YQSNPPPSL

SEQ ID NO: 9785 - protein, 9 aa, Artificial Sequence
  Description of Artificial Sequence: Synthetic peptide
THTNDVKQL

SEQ ID NO: 9786 - protein, 11 aa, Artificial Sequence
  Description of Artificial Sequence: Synthetic peptide
TQVDPGLADQL

SEQ ID NO: 9787 - protein, 11 aa, Artificial Sequence
  Description of Artificial Sequence: Synthetic peptide
VHAGPVAPGQL

SEQ ID NO: 9788 - protein, 11 aa, Artificial Sequence
  Description of Artificial Sequence: Synthetic peptide
TQIDPGLADQL

SEQ ID NO: 9789 - protein, 9 aa, Artificial Sequence
  Description of Artificial Sequence: Synthetic peptide
QHSRIGITL

SEQ ID NO: 9790 - protein, 10 aa, Artificial Sequence
  Description of Artificial Sequence: Synthetic peptide
ERQGQGTVSF

SEQ ID NO: 9791 - protein, 9 aa, Artificial Sequence
  Description of Artificial Sequence: Synthetic peptide
THLEGKVIL

SEQ ID NO: 9792 - protein, 9 aa, Artificial Sequence
  Description of Artificial Sequence: Synthetic peptide
EHLKTAVQM

SEQ ID NO: 9793 - protein, 11 aa, Artificial Sequence
  Description of Artificial Sequence: Synthetic peptide
VQAGPVAPGQM

SEQ ID NO: 9794 - protein, 9 aa, Artificial Sequence
  Description of Artificial Sequence: Synthetic peptide
TYQIYQEQY

SEQ ID NO: 9795 - protein, 9 aa, Artificial Sequence
  Description of Artificial Sequence: Synthetic peptide
SQATNSVTT

SEQ ID NO: 9796 - protein, 9 aa, Artificial Sequence
  Description of Artificial Sequence: Synthetic peptide
MEDPERQVL

SEQ ID NO: 9797 - protein, 9 aa, Artificial Sequence
  Description of Artificial Sequence: Synthetic peptide
GQKAIGTVL

SEQ ID NO: 9798 - protein, 9 aa, Artificial Sequence
  Description of Artificial Sequence: Synthetic peptide
IHTDNGSNF

SEQ ID NO: 9799 - protein, 11 aa, Artificial Sequence
  Description of Artificial Sequence: Synthetic peptide
SQATNSVTTAM

SEQ ID NO: 9800 - protein, 9 aa, Artificial Sequence
  Description of Artificial Sequence: Synthetic peptide
VHTDNGSNF

SEQ ID NO: 9801 - protein, 9 aa, Artificial Sequence
  Description of Artificial Sequence: Synthetic peptide
HQAISPRTL

SEQ ID NO: 9802 - protein, 9 aa, Artificial Sequence
  Description of Artificial Sequence: Synthetic peptide
ARILAVESY

SEQ ID NO: 9803 - protein, 10 aa, Artificial Sequence
  Description of Artificial Sequence: Synthetic peptide
SQYALGIIQA

SEQ ID NO: 9804 - protein, 8 aa, Artificial Sequence
  Description of Artificial Sequence: Synthetic peptide
WQRPVVTV

SEQ ID NO: 9805 - protein, 9 aa, Artificial Sequence
  Description of Artificial Sequence: Synthetic peptide
VQLGIPHPA

SEQ ID NO: 9806 - protein, 8 aa, Artificial Sequence
  Description of Artificial Sequence: Synthetic peptide
TEVIPLTA

SEQ ID NO: 9807 - protein, 9 aa, Artificial Sequence
  Description of Artificial Sequence: Synthetic peptide
SRPPAEPTA

SEQ ID NO: 9808 - protein, 11 aa, Artificial Sequence
  Description of Artificial Sequence: Synthetic peptide
THLEGKGILVA

SEQ ID NO: 9809 - protein, 9 aa, Artificial Sequence
  Description of Artificial Sequence: Synthetic peptide
DHSDIKVVP

SEQ ID NO: 9810 - protein, 8 aa, Artificial Sequence
  Description of Artificial Sequence: Synthetic peptide
DQIPIEIC

SEQ ID NO: 9811 - protein, 8 aa, Artificial Sequence
  Description of Artificial Sequence: Synthetic peptide
THGIKPVV

SEQ ID NO: 9812 - protein, 8 aa, Artificial Sequence
  Description of Artificial Sequence: Synthetic peptide
THGIRPVV

SEQ ID NO: 9813 - protein, 8 aa, Artificial Sequence
  Description of Artificial Sequence: Synthetic peptide
VHIPLGEA

SEQ ID NO: 9814 - protein, 9 aa, Artificial Sequence
  Description of Artificial Sequence: Synthetic peptide
SQATNVNAA

SEQ ID NO: 9815 - protein, 9 aa, Artificial Sequence
  Description of Artificial Sequence: Synthetic peptide
TPLEITAIA

SEQ ID NO: 9816 - protein, 8 aa, Artificial Sequence
  Description of Artificial Sequence: Synthetic peptide
DQIPLEIC

SEQ ID NO: 9817 - protein, 9 aa, Artificial Sequence
  Description of Artificial Sequence: Synthetic peptide
HQVSVEPPA

SEQ ID NO: 9818 - protein, 8 aa, Artificial Sequence
  Description of Artificial Sequence: Synthetic peptide
DHSDIKVV

SEQ ID NO: 9819 - protein, 8 aa, Artificial Sequence
  Description of Artificial Sequence: Synthetic peptide
DQILIEIC

SEQ ID NO: 9820 - protein, 9 aa, Artificial Sequence
  Description of Artificial Sequence: Synthetic peptide
TRIGPGQAL

SEQ ID NO: 9821 - protein, 8 aa, Artificial Sequence
  Description of Artificial Sequence: Synthetic peptide
HQISVESP

SEQ ID NO: 9822 - protein, 8 aa, Artificial Sequence
  Description of Artificial Sequence: Synthetic peptide
SQATNVNA

SEQ ID NO: 9823 - protein, 8 aa, Artificial Sequence
  Description of Artificial Sequence: Synthetic peptide
GKVILVAV

SEQ ID NO: 9824 - protein, 9 aa, Artificial Sequence
  Description of Artificial Sequence: Synthetic peptide
SRLAFEHKA

SEQ ID NO: 9825 - protein, 9 aa, Artificial Sequence
  Description of Artificial Sequence: Synthetic peptide
QQHLLQLTV

SEQ ID NO: 9826 - protein, 8 aa, Artificial Sequence
  Description of Artificial Sequence: Synthetic peptide
ERIKVAST

SEQ ID NO: 9827 - protein, 9 aa, Artificial Sequence
  Description of Artificial Sequence: Synthetic peptide
HQISVESPA

SEQ ID NO: 9828 - protein, 8 aa, Artificial Sequence
  Description of Artificial Sequence: Synthetic peptide
DRLHPVQA

SEQ ID NO: 9829 - protein, 9 aa, Artificial Sequence
  Description of Artificial Sequence: Synthetic peptide
EPIGLAPTA

SEQ ID NO: 9830 - protein, 10 aa, Artificial Sequence
  Description of Artificial Sequence: Synthetic peptide
NHPGSQPSTA

SEQ ID NO: 9831 - protein, 9 aa, Artificial Sequence
  Description of Artificial Sequence: Synthetic peptide
HPVQAGPVA

SEQ ID NO: 9832 - protein, 9 aa, Artificial Sequence
  Description of Artificial Sequence: Synthetic peptide
MEDPERQVL

SEQ ID NO: 9833 - protein, 9 aa, Artificial Sequence
  Description of Artificial Sequence: Synthetic peptide
REIDNYTEL

SEQ ID NO: 9834 - protein, 10 aa, Artificial Sequence
  Description of Artificial Sequence: Synthetic peptide
IEVKDTKEAL

SEQ ID NO: 9835 - protein, 9 aa, Artificial Sequence
  Description of Artificial Sequence: Synthetic peptide
FEEPVPLQL

SEQ ID NO: 9836 - protein, 9 aa, Artificial Sequence
  Description of Artificial Sequence: Synthetic peptide
MEDTEKEVL

SEQ ID NO: 9837 - protein, 9 aa, Artificial Sequence
  Description of Artificial Sequence: Synthetic peptide
MEDPEREVL

SEQ ID NO: 9838 - protein, 9 aa, Artificial Sequence
  Description of Artificial Sequence: Synthetic peptide
REIDNYTGL

SEQ ID NO: 9839 - protein, 10 aa, Artificial Sequence
  Description of Artificial Sequence: Synthetic peptide
AEGTDRAIEL

SEQ ID NO: 9840 - protein, 10 aa, Artificial Sequence
  Description of Artificial Sequence: Synthetic peptide
QELKNSAVSL

SEQ ID NO: 9841 - protein, 9 aa, Artificial Sequence
  Description of Artificial Sequence: Synthetic peptide
SEGATPQDL

SEQ ID NO: 9842 - protein, 11 aa, Artificial Sequence
  Description of Artificial Sequence: Synthetic peptide
SEVVSQIIEQL

SEQ ID NO: 9843 - protein, 8 aa, Artificial Sequence
  Description of Artificial Sequence: Synthetic peptide
IETVPVKL

SEQ ID NO: 9844 - protein, 10 aa, Artificial Sequence
  Description of Artificial Sequence: Synthetic peptide
QELKNSAISL

SEQ ID NO: 9845 - protein, 9 aa, Artificial Sequence
  Description of Artificial Sequence: Synthetic peptide
KELYPSASL

SEQ ID NO: 9846 - protein, 9 aa, Artificial Sequence
  Description of Artificial Sequence: Synthetic peptide
TEGETNSLL

SEQ ID NO: 9847 - protein, 9 aa, Artificial Sequence
  Description of Artificial Sequence: Synthetic peptide
SESEVVSQI

SEQ ID NO: 9848 - protein, 9 aa, Artificial Sequence
  Description of Artificial Sequence: Synthetic peptide
SEFNLPPVV

SEQ ID NO: 9849 - protein, 9 aa, Artificial Sequence
  Description of Artificial Sequence: Synthetic peptide
QELYPLTSL

SEQ ID NO: 9850 - protein, 9 aa, Artificial Sequence
  Description of Artificial Sequence: Synthetic peptide
KELYPLTSL

SEQ ID NO: 9851 - protein, 10 aa, Artificial Sequence
  Description of Artificial Sequence: Synthetic peptide
NESEGDKEEL

SEQ ID NO: 9852 - protein, 9 aa, Artificial Sequence
  Description of Artificial Sequence: Synthetic peptide
QEKNEQELL

SEQ ID NO: 9853 - protein, 10 aa, Artificial Sequence
  Description of Artificial Sequence: Synthetic peptide
IEAQQHLLQL

SEQ ID NO: 9854 - protein, 9 aa, Artificial Sequence
  Description of Artificial Sequence: Synthetic peptide
SESEIVNQI

SEQ ID NO: 9855 - protein, 9 aa, Artificial Sequence
  Description of Artificial Sequence: Synthetic peptide
KEIDNYTGV

SEQ ID NO: 9856 - protein, 9 aa, Artificial Sequence
  Description of Artificial Sequence: Synthetic peptide
YQSNPPPSL

SEQ ID NO: 9857 - protein, 10 aa, Artificial Sequence
  Description of Artificial Sequence: Synthetic peptide
AEHLKTAVQM

SEQ ID NO: 9858 - protein, 10 aa, Artificial Sequence
  Description of Artificial Sequence: Synthetic peptide
NESDGDREEL

SEQ ID NO: 9859 - protein, 9 aa, Artificial Sequence
  Description of Artificial Sequence: Synthetic peptide
AERQGTVSF

SEQ ID NO: 9860 - protein, 10 aa, Artificial Sequence
  Description of Artificial Sequence: Synthetic peptide
NESEGDREKL

SEQ ID NO: 9861 - protein, 10 aa, Artificial Sequence
  Description of Artificial Sequence: Synthetic peptide
QELRNSASSL

SEQ ID NO: 9862 - protein, 9 aa, Artificial Sequence
  Description of Artificial Sequence: Synthetic peptide
REDSDEDLL

SEQ ID NO: 9863 - protein, 8 aa, Artificial Sequence
  Description of Artificial Sequence: Synthetic peptide
IEAQQHLL

SEQ ID NO: 9864 - protein, 10 aa, Artificial Sequence
  Description of Artificial Sequence: Synthetic peptide
TETNNSTITI

SEQ ID NO: 9865 - protein, 10 aa, Artificial Sequence
  Description of Artificial Sequence: Synthetic peptide
VESYLKDQQL

SEQ ID NO: 9866 - protein, 11 aa, Artificial Sequence
  Description of Artificial Sequence: Synthetic peptide
QELKNSAINLL

SEQ ID NO: 9867 - protein, 8 aa, Artificial Sequence
  Description of Artificial Sequence: Synthetic peptide
TELQAINL

SEQ ID NO: 9868 - protein, 9 aa, Artificial Sequence
  Description of Artificial Sequence: Synthetic peptide
SEFNLPPVV

SEQ ID NO: 9869 - protein, 10 aa, Artificial Sequence
  Description of Artificial Sequence: Synthetic peptide
AEWDKTLQQV

SEQ ID NO: 9870 - protein, 9 aa, Artificial Sequence
  Description of Artificial Sequence: Synthetic peptide
MEDPERQVL

SEQ ID NO: 9871 - protein, 9 aa, Artificial Sequence
  Description of Artificial Sequence: Synthetic peptide
AERQGTVSF

SEQ ID NO: 9872 - protein, 9 aa, Artificial Sequence
  Description of Artificial Sequence: Synthetic peptide
NESVPINCI

SEQ ID NO: 9873 - protein, 11 aa, Artificial Sequence
  Description of Artificial Sequence: Synthetic peptide
AERQGQGTVSF

SEQ ID NO: 9874 - protein, 8 aa, Artificial Sequence
  Description of Artificial Sequence: Synthetic peptide
TDIQTKEL

SEQ ID NO: 9875 - protein, 10 aa, Artificial Sequence
  Description of Artificial Sequence: Synthetic peptide
AEHLKTAVQM

SEQ ID NO: 9876 - protein, 11 aa, Artificial Sequence
  Description of Artificial Sequence: Synthetic peptide
SEVVSQIIEQL

SEQ ID NO: 9877 - protein, 8 aa, Artificial Sequence
  Description of Artificial Sequence: Synthetic peptide
SDFNLPSV

SEQ ID NO: 9878 - protein, 9 aa, Artificial Sequence
  Description of Artificial Sequence: Synthetic peptide
QELYPLTSL

SEQ ID NO: 9879 - protein, 10 aa, Artificial Sequence
  Description of Artificial Sequence: Synthetic peptide
IEVKDTKEAL

SEQ ID NO: 9880 - protein, 10 aa, Artificial Sequence
  Description of Artificial Sequence: Synthetic peptide
AEGTDRAIEL

SEQ ID NO: 9881 - protein, 9 aa, Artificial Sequence
  Description of Artificial Sequence: Synthetic peptide
REIDNYTEL

SEQ ID NO: 9882 - protein, 8 aa, Artificial Sequence
  Description of Artificial Sequence: Synthetic peptide
SDLQTTEL

SEQ ID NO: 9883 - protein, 10 aa, Artificial Sequence
  Description of Artificial Sequence: Synthetic peptide
QELKNSAVSL

SEQ ID NO: 9884 - protein, 10 aa, Artificial Sequence
  Description of Artificial Sequence: Synthetic peptide
IEAQQHLLQL

SEQ ID NO: 9885 - protein, 10 aa, Artificial Sequence
  Description of Artificial Sequence: Synthetic peptide
SEFNLPPVVA

SEQ ID NO: 9886 - protein, 8 aa, Artificial Sequence
  Description of Artificial Sequence: Synthetic peptide
IETVPVKL

SEQ ID NO: 9887 - protein, 10 aa, Artificial Sequence
  Description of Artificial Sequence: Synthetic peptide
QELKNSAISL

SEQ ID NO: 9888 - protein, 9 aa, Artificial Sequence
  Description of Artificial Sequence: Synthetic peptide
SESEIVNQI

SEQ ID NO: 9889 - protein, 11 aa, Artificial Sequence
  Description of Artificial Sequence: Synthetic peptide
AEAMSQATNSV

SEQ ID NO: 9890 - protein, 8 aa, Artificial Sequence
  Description of Artificial Sequence: Synthetic peptide
YESPHPKI

SEQ ID NO: 9891 - protein, 9 aa, Artificial Sequence
  Description of Artificial Sequence: Synthetic peptide
KELYPLTSL

SEQ ID NO: 9892 - protein, 9 aa, Artificial Sequence
  Description of Artificial Sequence: Synthetic peptide
REIDNYTGL

SEQ ID NO: 9893 - protein, 9 aa, Artificial Sequence
  Description of Artificial Sequence: Synthetic peptide
FEEPVPLQL

SEQ ID NO: 9894 - protein, 9 aa, Artificial Sequence
  Description of Artificial Sequence: Synthetic peptide
SESEVVSQI

SEQ ID NO: 9895 - protein, 8 aa, Artificial Sequence
  Description of Artificial Sequence: Synthetic peptide
IEAQQHLL

SEQ ID NO: 9896 - protein, 8 aa, Artificial Sequence
  Description of Artificial Sequence: Synthetic peptide
TELQAINL

SEQ ID NO: 9897 - protein, 9 aa, Artificial Sequence
  Description of Artificial Sequence: Synthetic peptide
REIENYTGV

SEQ ID NO: 9898 - protein, 9 aa, Artificial Sequence
  Description of Artificial Sequence: Synthetic peptide
SDFNLPPVV

SEQ ID NO: 9899 - protein, 9 aa, Artificial Sequence
  Description of Artificial Sequence: Synthetic peptide
REFPSEQTP

SEQ ID NO: 9900 - protein, 8 aa, Artificial Sequence
  Description of Artificial Sequence: Synthetic peptide
AEKLGNLL

SEQ ID NO: 9901 - protein, 11 aa, Artificial Sequence
  Description of Artificial Sequence: Synthetic peptide
SELVNQIIEQL

SEQ ID NO: 9902 - protein, 9 aa, Artificial Sequence
  Description of Artificial Sequence: Synthetic peptide
KELYPSASL

SEQ ID NO: 9903 - protein, 9 aa, Artificial Sequence
  Description of Artificial Sequence: Synthetic peptide
SEGATPQDL

SEQ ID NO: 9904 - protein, 11 aa, Artificial Sequence
  Description of Artificial Sequence: Synthetic peptide
SELVSQIIEQL

SEQ ID NO: 9905 - protein, 9 aa, Artificial Sequence
  Description of Artificial Sequence: Synthetic peptide
KEIDNYTGV

SEQ ID NO: 9906 - protein, 9 aa, Artificial Sequence
  Description of Artificial Sequence: Synthetic peptide
YQSNPPPSL

SEQ ID NO: 9907 - protein, 9 aa, Artificial Sequence
  Description of Artificial Sequence: Synthetic peptide
LEKEPIVGA

SEQ ID NO: 9908 - protein, 9 aa, Artificial Sequence
  Description of Artificial Sequence: Synthetic peptide
AERQGQGTV

SEQ ID NO: 9909 - protein, 9 aa, Artificial Sequence
  Description of Artificial Sequence: Synthetic peptide
GERIISTYL

SEQ ID NO: 9910 - protein, 9 aa, Artificial Sequence
  Description of Artificial Sequence: Synthetic peptide
AEAVQRIST

SEQ ID NO: 9911 - protein, 9 aa, Artificial Sequence
  Description of Artificial Sequence: Synthetic peptide
MEDPEREVL

SEQ ID NO: 9912 - protein, 8 aa, Artificial Sequence
  Description of Artificial Sequence: Synthetic peptide
TEVIPLTA

SEQ ID NO: 9913 - protein, 9 aa, Artificial Sequence
  Description of Artificial Sequence: Synthetic peptide
SESELVNQI

SEQ ID NO: 9914 - protein, 9 aa, Artificial Sequence
  Description of Artificial Sequence: Synthetic peptide
REFPSEQTP

SEQ ID NO: 9915 - protein, 10 aa, Artificial Sequence
  Description of Artificial Sequence: Synthetic peptide
SEFNLPPVVA

SEQ ID NO: 9916 - protein, 9 aa, Artificial Sequence
  Description of Artificial Sequence: Synthetic peptide
LEKEPIVGA

SEQ ID NO: 9917 - protein, 9 aa, Artificial Sequence
  Description of Artificial Sequence: Synthetic peptide
SEFNLPPVV

SEQ ID NO: 9918 - protein, 9 aa, Artificial Sequence
  Description of Artificial Sequence: Synthetic peptide
LEKEPIIGA

SEQ ID NO: 9919 - protein, 10 aa, Artificial Sequence
  Description of Artificial Sequence: Synthetic peptide
RELPSEQTRA

SEQ ID NO: 9920 - protein, 11 aa, Artificial Sequence
  Description of Artificial Sequence: Synthetic peptide
AEWDKTLQQVA

SEQ ID NO: 9921 - protein, 9 aa, Artificial Sequence
  Description of Artificial Sequence: Synthetic peptide
AEAMSQATA

SEQ ID NO: 9922 - protein, 11 aa, Artificial Sequence
  Description of Artificial Sequence: Synthetic peptide
AEWDRLHPVQA

SEQ ID NO: 9923 - protein, 9 aa, Artificial Sequence
  Description of Artificial Sequence: Synthetic peptide
EEVGFPVTP

SEQ ID NO: 9924 - protein, 10 aa, Artificial Sequence
  Description of Artificial Sequence: Synthetic peptide
AEVTGDIRKA

SEQ ID NO: 9925 - protein, 10 aa, Artificial Sequence
  Description of Artificial Sequence: Synthetic peptide
AEWDKTLQQV

SEQ ID NO: 9926 - protein, 10 aa, Artificial Sequence
  Description of Artificial Sequence: Synthetic peptide
GELSPKQTRA

SEQ ID NO: 9927 - protein, 9 aa, Artificial Sequence
  Description of Artificial Sequence: Synthetic peptide
TETLLVQNA

SEQ ID NO: 9928 - protein, 8 aa, Artificial Sequence
  Description of Artificial Sequence: Synthetic peptide
TEVIPLTA

SEQ ID NO: 9929 - protein, 9 aa, Artificial Sequence
  Description of Artificial Sequence: Synthetic peptide
EEVGFPVRP

SEQ ID NO: 9930 - protein, 10 aa, Artificial Sequence
  Description of Artificial Sequence: Synthetic peptide
RELSSEQTRA

SEQ ID NO: 9931 - protein, 10 aa, Artificial Sequence
  Description of Artificial Sequence: Synthetic peptide
REFPSEQTPS

SEQ ID NO: 9932 - protein, 10 aa, Artificial Sequence
  Description of Artificial Sequence: Synthetic peptide
TEVIPLTAEA

SEQ ID NO: 9933 - protein, 10 aa, Artificial Sequence
  Description of Artificial Sequence: Synthetic peptide
SEVHIPLGEA

SEQ ID NO: 9934 - protein, 9 aa, Artificial Sequence
  Description of Artificial Sequence: Synthetic peptide
IEVKDTKEA

SEQ ID NO: 9935 - protein, 9 aa, Artificial Sequence
  Description of Artificial Sequence: Synthetic peptide
NESVKITCA

SEQ ID NO: 9936 - protein, 9 aa, Artificial Sequence
  Description of Artificial Sequence: Synthetic peptide
QEFGIPYNP

SEQ ID NO: 9937 - protein, 10 aa, Artificial Sequence
  Description of Artificial Sequence: Synthetic peptide
SDFNLPSVVA

SEQ ID NO: 9938 - protein, 10 aa, Artificial Sequence
  Description of Artificial Sequence: Synthetic peptide
TEIIPLTKEA

SEQ ID NO: 9939 - protein, 9 aa, Artificial Sequence
  Description of Artificial Sequence: Synthetic peptide
QEVGKAMYA

SEQ ID NO: 9940 - protein, 10 aa, Artificial Sequence
  Description of Artificial Sequence: Synthetic peptide
SDFNLPPVVA

SEQ ID NO: 9941 - protein, 8 aa, Artificial Sequence
  Description of Artificial Sequence: Synthetic peptide
SESAIRKA

SEQ ID NO: 9942 - protein, 9 aa, Artificial Sequence
  Description of Artificial Sequence: Synthetic peptide
REIENYTGV

SEQ ID NO: 9943 - protein, 9 aa, Artificial Sequence
  Description of Artificial Sequence: Synthetic peptide
AERQGTVSF

SEQ ID NO: 9944 - protein, 9 aa, Artificial Sequence
  Description of Artificial Sequence: Synthetic peptide
MEDPERQVL

SEQ ID NO: 9945 - protein, 8 aa, Artificial Sequence
  Description of Artificial Sequence: Synthetic peptide
AEKLGNLL

SEQ ID NO: 9946 - protein, 8 aa, Artificial Sequence
  Description of Artificial Sequence: Synthetic peptide
TDIQTKEL

SEQ ID NO: 9947 - protein, 11 aa, Artificial Sequence
  Description of Artificial Sequence: Synthetic peptide
AERQGQGTVSF

SEQ ID NO: 9948 - protein, 8 aa, Artificial Sequence
  Description of Artificial Sequence: Synthetic peptide
AEHLKTAV

SEQ ID NO: 9949 - protein, 9 aa, Artificial Sequence
  Description of Artificial Sequence: Synthetic peptide
MEDPEREVL

SEQ ID NO: 9950 - protein, 9 aa, Artificial Sequence
  Description of Artificial Sequence: Synthetic peptide
AEAVQRIST

SEQ ID NO: 9951 - protein, 8 aa, Artificial Sequence
  Description of Artificial Sequence: Synthetic peptide
SDLQTTEL

SEQ ID NO: 9952 - protein, 9 aa, Artificial Sequence
  Description of Artificial Sequence: Synthetic peptide
GERIISTYL

SEQ ID NO: 9953 - protein, 9 aa, Artificial Sequence
  Description of Artificial Sequence: Synthetic peptide
GEQDRGRSI

SEQ ID NO: 9954 - protein, 9 aa, Artificial Sequence
  Description of Artificial Sequence: Synthetic peptide
SESAIRKAI

SEQ ID NO: 9955 - protein, 9 aa, Artificial Sequence
  Description of Artificial Sequence: Synthetic peptide
AERQGQGTV

SEQ ID NO: 9956 - protein, 9 aa, Artificial Sequence
  Description of Artificial Sequence: Synthetic peptide
QEKNEQELL

SEQ ID NO: 9957 - protein, 10 aa, Artificial Sequence
  Description of Artificial Sequence: Synthetic peptide
AEGTDRAIEL

SEQ ID NO: 9958 - protein, 9 aa, Artificial Sequence
  Description of Artificial Sequence: Synthetic peptide
REIDNYTEL

SEQ ID NO: 9959 - protein, 9 aa, Artificial Sequence
  Description of Artificial Sequence: Synthetic peptide
SEFNLPPVV

SEQ ID NO: 9960 - protein, 9 aa, Artificial Sequence
  Description of Artificial Sequence: Synthetic peptide
QELYPLTSL

SEQ ID NO: 9961 - protein, 8 aa, Artificial Sequence
  Description of Artificial Sequence: Synthetic peptide
NELERFAL

SEQ ID NO: 9962 - protein, 8 aa, Artificial Sequence
  Description of Artificial Sequence: Synthetic peptide
IEAQQHLL

SEQ ID NO: 9963 - protein, 9 aa, Artificial Sequence
  Description of Artificial Sequence: Synthetic peptide
AERILGTYL

SEQ ID NO: 9964 - protein, 9 aa, Artificial Sequence
  Description of Artificial Sequence: Synthetic peptide
GERILSTYL

SEQ ID NO: 9965 - protein, 9 aa, Artificial Sequence
  Description of Artificial Sequence: Synthetic peptide
KEKGGLEGL

SEQ ID NO: 9966 - protein, 9 aa, Artificial Sequence
  Description of Artificial Sequence: Synthetic peptide
REIDNYTGL

SEQ ID NO: 9967 - protein, 9 aa, Artificial Sequence
  Description of Artificial Sequence: Synthetic peptide
NESVPINCI

SEQ ID NO: 9968 - protein, 9 aa, Artificial Sequence
  Description of Artificial Sequence: Synthetic peptide
LEKEPIIGA

SEQ ID NO: 9969 - protein, 9 aa, Artificial Sequence
  Description of Artificial Sequence: Synthetic peptide
LEKEPIVGA

SEQ ID NO: 9970 - protein, 10 aa, Artificial Sequence
  Description of Artificial Sequence: Synthetic peptide
AEHLKTAVQM

SEQ ID NO: 9971 - protein, 8 aa, Artificial Sequence
  Description of Artificial Sequence: Synthetic peptide
YESPHPKI

SEQ ID NO: 9972 - protein, 8 aa, Artificial Sequence
  Description of Artificial Sequence: Synthetic peptide
TERQANFL

SEQ ID NO: 9973 - protein, 9 aa, Artificial Sequence
  Description of Artificial Sequence: Synthetic peptide
KELYPLTSL

SEQ ID NO: 9974 - protein, 9 aa, Artificial Sequence
  Description of Artificial Sequence: Synthetic peptide
GEQGRGRSI

SEQ ID NO: 9975 - protein, 8 aa, Artificial Sequence
  Description of Artificial Sequence: Synthetic peptide
TELQAINL

SEQ ID NO: 9976 - protein, 8 aa, Artificial Sequence
  Description of Artificial Sequence: Synthetic peptide
GQMVHQAL

SEQ ID NO: 9977 - protein, 9 aa, Artificial Sequence
  Description of Artificial Sequence: Synthetic peptide
MEDTEKEVL

SEQ ID NO: 9978 - protein, 9 aa, Artificial Sequence
  Description of Artificial Sequence: Synthetic peptide
QEKNEKELL

SEQ ID NO: 9979 - protein, 8 aa, Artificial Sequence
  Description of Artificial Sequence: Synthetic peptide
GERIISTY

SEQ ID NO: 9980 - protein, 10 aa, Artificial Sequence
  Description of Artificial Sequence: Synthetic peptide
QELKNSAVSL

SEQ ID NO: 9981 - protein, 9 aa, Artificial Sequence
  Description of Artificial Sequence: Synthetic peptide
REIENYTGV

SEQ ID NO: 9982 - protein, 9 aa, Artificial Sequence
  Description of Artificial Sequence: Synthetic peptide
FEEPVPLQL

SEQ ID NO: 9983 - protein, 9 aa, Artificial Sequence
  Description of Artificial Sequence: Synthetic peptide
KELYPSASL

SEQ ID NO: 9984 - protein, 9 aa, Artificial Sequence
  Description of Artificial Sequence: Synthetic peptide
TEMEKEGKI

SEQ ID NO: 9985 - protein, 10 aa, Artificial Sequence
  Description of Artificial Sequence: Synthetic peptide
AEWDKTLQQV

SEQ ID NO: 9986 - protein, 8 aa, Artificial Sequence
  Description of Artificial Sequence: Synthetic peptide
RELERYAL

SEQ ID NO: 9987 - protein, 10 aa, Artificial Sequence
  Description of Artificial Sequence: Synthetic peptide
QELKNSAISL

SEQ ID NO: 9988 - protein, 8 aa, Artificial Sequence
  Description of Artificial Sequence: Synthetic peptide
SEVVSQII

SEQ ID NO: 9989 - protein, 11 aa, Artificial Sequence
  Description of Artificial Sequence: Synthetic peptide
AEQASQDVKNW

SEQ ID NO: 9990 - protein, 11 aa, Artificial Sequence
  Description of Artificial Sequence: Synthetic peptide
AEQATQEVKNW

SEQ ID NO: 9991 - protein, 11 aa, Artificial Sequence
  Description of Artificial Sequence: Synthetic peptide
AEVTGDIRKAY

SEQ ID NO: 9992 - protein, 9 aa, Artificial Sequence
  Description of Artificial Sequence: Synthetic peptide
EEINLPGKW

SEQ ID NO: 9993 - protein, 9 aa, Artificial Sequence
  Description of Artificial Sequence: Synthetic peptide
EEMNLPGKW

SEQ ID NO: 9994 - protein, 9 aa, Artificial Sequence
  Description of Artificial Sequence: Synthetic peptide
AERQGTVSF

SEQ ID NO: 9995 - protein, 11 aa, Artificial Sequence
  Description of Artificial Sequence: Synthetic peptide
AEIQKQGQDQW

SEQ ID NO: 9996 - protein, 9 aa, Artificial Sequence
  Description of Artificial Sequence: Synthetic peptide
SESAIRKAI

SEQ ID NO: 9997 - protein, 9 aa, Artificial Sequence
  Description of Artificial Sequence: Synthetic peptide
EEMSLPGKW

SEQ ID NO: 9998 - protein, 8 aa, Artificial Sequence
  Description of Artificial Sequence: Synthetic peptide
AEADRFDW

SEQ ID NO: 9999 - protein, 11 aa, Artificial Sequence
  Description of Artificial Sequence: Synthetic peptide
AERQGQGTVSF

SEQ ID NO: 10000 - protein, 9 aa, Artificial Sequence
  Description of Artificial Sequence: Synthetic peptide
NEIWQNMTW

SEQ ID NO: 10001 - protein, 9 aa, Artificial Sequence
  Description of Artificial Sequence: Synthetic peptide
SESEIVNQI

SEQ ID NO: 10002 - protein, 9 aa, Artificial Sequence
  Description of Artificial Sequence: Synthetic peptide
QELLKLDTW

SEQ ID NO: 10003 - protein, 11 aa, Artificial Sequence
  Description of Artificial Sequence: Synthetic peptide
AEIQKQEQGQW

SEQ ID NO: 10004 - protein, 9 aa, Artificial Sequence
  Description of Artificial Sequence: Synthetic peptide
YETEAHNIW

SEQ ID NO: 10005 - protein, 10 aa, Artificial Sequence
  Description of Artificial Sequence: Synthetic peptide
GEARLVVKTY

SEQ ID NO: 10006 - protein, 10 aa, Artificial Sequence
  Description of Artificial Sequence: Synthetic peptide
NETPGIRYQY

SEQ ID NO: 10007 - protein, 9 aa, Artificial Sequence
  Description of Artificial Sequence: Synthetic peptide
AETGQETAY

SEQ ID NO: 10008 - protein, 9 aa, Artificial Sequence
  Description of Artificial Sequence: Synthetic peptide
VEMGHDAPW

SEQ ID NO: 10009 - protein, 11 aa, Artificial Sequence
  Description of Artificial Sequence: Synthetic peptide
NEQELLKLDTW

SEQ ID NO: 10010 - protein, 9 aa, Artificial Sequence
  Description of Artificial Sequence: Synthetic peptide
DEIWNNMTW

SEQ ID NO: 10011 - protein, 9 aa, Artificial Sequence
  Description of Artificial Sequence: Synthetic peptide
MEDPERQVL

SEQ ID NO: 10012 - protein, 11 aa, Artificial Sequence
  Description of Artificial Sequence: Synthetic peptide
AEVTGDIRKAY

SEQ ID NO: 10013 - protein, 11 aa, Artificial Sequence
  Description of Artificial Sequence: Synthetic peptide
AEQASQDVKNW

SEQ ID NO: 10014 - protein, 9 aa, Artificial Sequence
  Description of Artificial Sequence: Synthetic peptide
EEINLPGKW

SEQ ID NO: 10015 - protein, 11 aa, Artificial Sequence
  Description of Artificial Sequence: Synthetic peptide
AEQATQEVKNW

SEQ ID NO: 10016 - protein, 11 aa, Artificial Sequence
  Description of Artificial Sequence: Synthetic peptide
AEIQKQGQDQW

SEQ ID NO: 10017 - protein, 9 aa, Artificial Sequence
  Description of Artificial Sequence: Synthetic peptide
EEMNLPGKW

SEQ ID NO: 10018 - protein, 8 aa, Artificial Sequence
  Description of Artificial Sequence: Synthetic peptide
AEADRFDW

SEQ ID NO: 10019 - protein, 9 aa, Artificial Sequence
  Description of Artificial Sequence: Synthetic peptide
SESAIRKAI

SEQ ID NO: 10020 - protein, 9 aa, Artificial Sequence
  Description of Artificial Sequence: Synthetic peptide
AERQGTVSF

SEQ ID NO: 10021 - protein, 9 aa, Artificial Sequence
  Description of Artificial Sequence: Synthetic peptide
SESEIVNQI

SEQ ID NO: 10022 - protein, 9 aa, Artificial Sequence
  Description of Artificial Sequence: Synthetic peptide
EEMSLPGKW

SEQ ID NO: 10023 - protein, 10 aa, Artificial Sequence
  Description of Artificial Sequence: Synthetic peptide
GEARLVVKTY

SEQ ID NO: 10024 - protein, 11 aa, Artificial Sequence
  Description of Artificial Sequence: Synthetic peptide
AEIQKQEQGQW

SEQ ID NO: 10025 - protein, 11 aa, Artificial Sequence
  Description of Artificial Sequence: Synthetic peptide
AEVQKQGDGQW

SEQ ID NO: 10026 - protein, 9 aa, Artificial Sequence
  Description of Artificial Sequence: Synthetic peptide
NEIWQNMTW

SEQ ID NO: 10027 - protein, 9 aa, Artificial Sequence
  Description of Artificial Sequence: Synthetic peptide
QELLKLDTW

SEQ ID NO: 10028 - protein, 10 aa, Artificial Sequence
  Description of Artificial Sequence: Synthetic peptide
NETPGIRYQY

SEQ ID NO: 10029 - protein, 11 aa, Artificial Sequence
  Description of Artificial Sequence: Synthetic peptide
LEVNIVTDSQY

SEQ ID NO: 10030 - protein, 9 aa, Artificial Sequence
  Description of Artificial Sequence: Synthetic peptide
SESEVVSQI

SEQ ID NO: 10031 - protein, 9 aa, Artificial Sequence
  Description of Artificial Sequence: Synthetic peptide
SESELVNQI

SEQ ID NO: 10032 - protein, 11 aa, Artificial Sequence
  Description of Artificial Sequence: Synthetic peptide
LEVNIITDSQY

SEQ ID NO: 10033 - protein, 11 aa, Artificial Sequence
  Description of Artificial Sequence: Synthetic peptide
REIDNYTELVY

SEQ ID NO: 10034 - protein, 9 aa, Artificial Sequence
  Description of Artificial Sequence: Synthetic peptide
MEDPERQVL

SEQ ID NO: 10035 - protein, 11 aa, Artificial Sequence
  Description of Artificial Sequence: Synthetic peptide
AERQGQGTVSF

SEQ ID NO: 10036 - protein, 11 aa, Artificial Sequence
  Description of Artificial Sequence: Synthetic peptide
NEQELLKLDTW

SEQ ID NO: 10037 - protein, 9 aa, Artificial Sequence
  Description of Artificial Sequence: Synthetic peptide
YETEAHNIW

SEQ ID NO: 10038 - protein, 11 aa, Artificial Sequence
  Description of Artificial Sequence: Synthetic peptide
KEIDNYTGVIY

SEQ ID NO: 10039 - protein, 9 aa, Artificial Sequence
  Description of Artificial Sequence: Synthetic peptide
DEIWNNMTW

SEQ ID NO: 10040 - protein, 11 aa, Artificial Sequence
  Description of Artificial Sequence: Synthetic peptide
AEIQKQGHGQW

SEQ ID NO: 10041 - protein, 9 aa, Artificial Sequence
  Description of Artificial Sequence: Synthetic peptide
AETGQETAY

SEQ ID NO: 10042 - protein, 11 aa, Artificial Sequence
  Description of Artificial Sequence: Synthetic peptide
MEDPERQVLKW

SEQ ID NO: 10043 - protein, 9 aa, Artificial Sequence
  Description of Artificial Sequence: Synthetic peptide
TEMEKEGKI

SEQ ID NO: 10044 - protein, 8 aa, Artificial Sequence
  Description of Artificial Sequence: Synthetic peptide
TEADPFDW

SEQ ID NO: 10045 - protein, 9 aa, Artificial Sequence
  Description of Artificial Sequence: Synthetic peptide
SESELVSQI

SEQ ID NO: 10046 - protein, 10 aa, Artificial Sequence
  Description of Artificial Sequence: Synthetic peptide
SETEADPFDW

SEQ ID NO: 10047 - protein, 10 aa, Artificial Sequence
  Description of Artificial Sequence: Synthetic peptide
EEHEKYHNNW

SEQ ID NO: 10048 - protein, 9 aa, Artificial Sequence
  Description of Artificial Sequence: Synthetic peptide
SEFNLPPVV

SEQ ID NO: 10049 - protein, 9 aa, Artificial Sequence
  Description of Artificial Sequence: Synthetic peptide
SETGQETAY

SEQ ID NO: 10050 - protein, 11 aa, Artificial Sequence
  Description of Artificial Sequence: Synthetic peptide
REIDNYTGLIY

SEQ ID NO: 10051 - protein, 10 aa, Artificial Sequence
  Description of Artificial Sequence: Synthetic peptide
AETGQETAYF

SEQ ID NO: 10052 - protein, 11 aa, Artificial Sequence
  Description of Artificial Sequence: Synthetic peptide
KEKGGLEGLVW

SEQ ID NO: 10053 - protein, 9 aa, Artificial Sequence
  Description of Artificial Sequence: Synthetic peptide
NESVPINCI

SEQ ID NO: 10054 - protein, 11 aa, Artificial Sequence
  Description of Artificial Sequence: Synthetic peptide
REIENYTGVIY

SEQ ID NO: 10055 - protein, 11 aa, Artificial Sequence
  Description of Artificial Sequence: Synthetic peptide
QELKNSAVSLF

SEQ ID NO: 10056 - protein, 8 aa, Artificial Sequence
  Description of Artificial Sequence: Synthetic peptide
NETPGIRY

SEQ ID NO: 10057 - protein, 11 aa, Artificial Sequence
  Description of Artificial Sequence: Synthetic peptide
MEDPEREVLVW

SEQ ID NO: 10058 - protein, 11 aa, Artificial Sequence
  Description of Artificial Sequence: Synthetic peptide
GEARLVVKTYW

SEQ ID NO: 10059 - protein, 9 aa, Artificial Sequence
  Description of Artificial Sequence: Synthetic peptide
AERQGTVSF

SEQ ID NO: 10060 - protein, 11 aa, Artificial Sequence
  Description of Artificial Sequence: Synthetic peptide
AERQGQGTVSF

SEQ ID NO: 10061 - protein, 11 aa, Artificial Sequence
  Description of Artificial Sequence: Synthetic peptide
AEIQKQGQDQW

SEQ ID NO: 10062 - protein, 11 aa, Artificial Sequence
  Description of Artificial Sequence: Synthetic peptide
AEQATQEVKNW

SEQ ID NO: 10063 - protein, 9 aa, Artificial Sequence
  Description of Artificial Sequence: Synthetic peptide
MEDPERQVL

SEQ ID NO: 10064 - protein, 9 aa, Artificial Sequence
  Description of Artificial Sequence: Synthetic peptide
NESVPINCI

SEQ ID NO: 10065 - protein, 10 aa, Artificial Sequence
  Description of Artificial Sequence: Synthetic peptide
EEIIIRSENL

SEQ ID NO: 10066 - protein, 11 aa, Artificial Sequence
  Description of Artificial Sequence: Synthetic peptide
AEQASQDVKNW

SEQ ID NO: 10067 - protein, 11 aa, Artificial Sequence
  Description of Artificial Sequence: Synthetic peptide
AEIQKQEQGQW

SEQ ID NO: 10068 - protein, 10 aa, Artificial Sequence
  Description of Artificial Sequence: Synthetic peptide
AETGQETAYF

SEQ ID NO: 10069 - protein, 9 aa, Artificial Sequence
  Description of Artificial Sequence: Synthetic peptide
EEINLPGKW

SEQ ID NO: 10070 - protein, 9 aa, Artificial Sequence
  Description of Artificial Sequence: Synthetic peptide
SESEIVNQI

SEQ ID NO: 10071 - protein, 10 aa, Artificial Sequence
  Description of Artificial Sequence: Synthetic peptide
EEVIIRSENL

SEQ ID NO: 10072 - protein, 10 aa, Artificial Sequence
  Description of Artificial Sequence: Synthetic peptide
SENLTNNAKI

SEQ ID NO: 10073 - protein, 9 aa, Artificial Sequence
  Description of Artificial Sequence: Synthetic peptide
EEMNLPGKW

SEQ ID NO: 10074 - protein, 10 aa, Artificial Sequence
  Description of Artificial Sequence: Synthetic peptide
QELKNSAVSL

SEQ ID NO: 10075 - protein, 10 aa, Artificial Sequence
  Description of Artificial Sequence: Synthetic peptide
KEPIIGAETF

SEQ ID NO: 10076 - protein, 10 aa, Artificial Sequence
  Description of Artificial Sequence: Synthetic peptide
SETGQETAYF

SEQ ID NO: 10077 - protein, 10 aa, Artificial Sequence
  Description of Artificial Sequence: Synthetic peptide
AEGTDRAIEL

SEQ ID NO: 10078 - protein, 9 aa, Artificial Sequence
  Description of Artificial Sequence: Synthetic peptide
SESEVVSQI

SEQ ID NO: 10079 - protein, 11 aa, Artificial Sequence
  Description of Artificial Sequence: Synthetic peptide
AELELAENREI

SEQ ID NO: 10080 - protein, 9 aa, Artificial Sequence
  Description of Artificial Sequence: Synthetic peptide
EELLQAVRL

SEQ ID NO: 10081 - protein, 9 aa, Artificial Sequence
  Description of Artificial Sequence: Synthetic peptide
REIDNYTGL

SEQ ID NO: 10082 - protein, 9 aa, Artificial Sequence
  Description of Artificial Sequence: Synthetic peptide
REIDNYTEL

SEQ ID NO: 10083 - protein, 10 aa, Artificial Sequence
  Description of Artificial Sequence: Synthetic peptide
KEPIVGAETF

SEQ ID NO: 10084 - protein, 11 aa, Artificial Sequence
  Description of Artificial Sequence: Synthetic peptide
QELKNSAINLL

SEQ ID NO: 10085 - protein, 11 aa, Artificial Sequence
  Description of Artificial Sequence: Synthetic peptide
AEVQKQGDGQW

SEQ ID NO: 10086 - protein, 11 aa, Artificial Sequence
  Description of Artificial Sequence: Synthetic peptide
AEAMSQATAGM

SEQ ID NO: 10087 - protein, 11 aa, Artificial Sequence
  Description of Artificial Sequence: Synthetic peptide
AELELAENKEI

SEQ ID NO: 10088 - protein, 10 aa, Artificial Sequence
  Description of Artificial Sequence: Synthetic peptide
EEVMVRSENL

SEQ ID NO: 10089 - protein, 10 aa, Artificial Sequence
  Description of Artificial Sequence: Synthetic peptide
AEHLKTAVQM

SEQ ID NO: 10090 - protein, 9 aa, Artificial Sequence
  Description of Artificial Sequence: Synthetic peptide
TEMEKEGKI

SEQ ID NO: 10091 - protein, 9 aa, Artificial Sequence
  Description of Artificial Sequence: Synthetic peptide
EEMSLPGKW

SEQ ID NO: 10092 - protein, 9 aa, Artificial Sequence
  Description of Artificial Sequence: Synthetic peptide
SESELVNQI

SEQ ID NO: 10093 - protein, 10 aa, Artificial Sequence
  Description of Artificial Sequence: Synthetic peptide
QELKNSAISL

SEQ ID NO: 10094 - protein, 10 aa, Artificial Sequence
  Description of Artificial Sequence: Synthetic peptide
AEGTDRIIEI

SEQ ID NO: 10095 - protein, 9 aa, Artificial Sequence
  Description of Artificial Sequence: Synthetic peptide
SESAIRKAI

SEQ ID NO: 10096 - protein, 10 aa, Artificial Sequence
  Description of Artificial Sequence: Synthetic peptide
EEIKSLYNTV

SEQ ID NO: 10097 - protein, 9 aa, Artificial Sequence
  Description of Artificial Sequence: Synthetic peptide
GEQDRGRSI

SEQ ID NO: 10098 - protein, 10 aa, Artificial Sequence
  Description of Artificial Sequence: Synthetic peptide
QELKNSAINL

SEQ ID NO: 10099 - protein, 9 aa, Artificial Sequence
  Description of Artificial Sequence: Synthetic peptide
QEEADEVGF

SEQ ID NO: 10100 - protein, 10 aa, Artificial Sequence
  Description of Artificial Sequence: Synthetic peptide
AEWDKTLQQV

SEQ ID NO: 10101 - protein, 11 aa, Artificial Sequence
  Description of Artificial Sequence: Synthetic peptide
QELKNSAVSLF

SEQ ID NO: 10102 - protein, 9 aa, Artificial Sequence
  Description of Artificial Sequence: Synthetic peptide
SEGATPQDL

SEQ ID NO: 10103 - protein, 11 aa, Artificial Sequence
  Description of Artificial Sequence: Synthetic peptide
AEIQKQGHGQW

SEQ ID NO: 10104 - protein, 11 aa, Artificial Sequence
  Description of Artificial Sequence: Synthetic peptide
SEVVSQIIEQL

SEQ ID NO: 10105 - protein, 11 aa, Artificial Sequence
  Description of Artificial Sequence: Synthetic peptide
SELVNQIIEQL

SEQ ID NO: 10106 - protein, 9 aa, Artificial Sequence
  Description of Artificial Sequence: Synthetic peptide
SESELVSQI

SEQ ID NO: 10107 - protein, 10 aa, Artificial Sequence
  Description of Artificial Sequence: Synthetic peptide
SESEIVNQII

SEQ ID NO: 10108 - protein, 9 aa, Artificial Sequence
  Description of Artificial Sequence: Synthetic peptide
QELYPLTSL

SEQ ID NO: 10109 - protein, 10 aa, Artificial Sequence
  Description of Artificial Sequence: Synthetic peptide
AEAMSQATNV

SEQ ID NO: 10110 - protein, 11 aa, Artificial Sequence
  Description of Artificial Sequence: Synthetic peptide
AEVTGDIRKAY

SEQ ID NO: 10111 - protein, 9 aa, Artificial Sequence
  Description of Artificial Sequence: Synthetic peptide
SEFNLPPVV

SEQ ID NO: 10112 - protein, 10 aa, Artificial Sequence
  Description of Artificial Sequence: Synthetic peptide
AEGTDRVIEI

SEQ ID NO: 10113 - protein, 9 aa, Artificial Sequence
  Description of Artificial Sequence: Synthetic peptide
AERILGTYL

SEQ ID NO: 10114 - protein, 9 aa, Artificial Sequence
  Description of Artificial Sequence: Synthetic peptide
QEESDEVGF

SEQ ID NO: 10115 - protein, 8 aa, Artificial Sequence
  Description of Artificial Sequence: Synthetic peptide
AEKLGNLL

SEQ ID NO: 10116 - protein, 10 aa, Artificial Sequence
  Description of Artificial Sequence: Synthetic peptide
QELRNSASSL

SEQ ID NO: 10117 - protein, 9 aa, Artificial Sequence
  Description of Artificial Sequence: Synthetic peptide
QEKNEQELL

SEQ ID NO: 10118 - protein, 10 aa, Artificial Sequence
  Description of Artificial Sequence: Synthetic peptide
TETNNSTITI

SEQ ID NO: 10119 - protein, 10 aa, Artificial Sequence
  Description of Artificial Sequence: Synthetic peptide
TELQKQITKI

SEQ ID NO: 10120 - protein, 11 aa, Artificial Sequence
  Description of Artificial Sequence: Synthetic peptide
QELRNSASSLF

SEQ ID NO: 10121 - protein, 11 aa, Artificial Sequence
  Description of Artificial Sequence: Synthetic peptide
SELVSQIIEQL

SEQ ID NO: 10122 - protein, 9 aa, Artificial Sequence
  Description of Artificial Sequence: Synthetic peptide
KEAVDLSHF

SEQ ID NO: 10123 - protein, 9 aa, Artificial Sequence
  Description of Artificial Sequence: Synthetic peptide
SELEKEGKI

SEQ ID NO: 10124 - protein, 11 aa, Artificial Sequence
  Description of Artificial Sequence: Synthetic peptide
AERQRPGTVSF

SEQ ID NO: 10125 - protein, 9 aa, Artificial Sequence
  Description of Artificial Sequence: Synthetic peptide
KELYPSASL

SEQ ID NO: 10126 - protein, 9 aa, Artificial Sequence
  Description of Artificial Sequence: Synthetic peptide
TEGETNSLL

SEQ ID NO: 10127 - protein, 10 aa, Artificial Sequence
  Description of Artificial Sequence: Synthetic peptide
VESKAEADRF

SEQ ID NO: 10128 - protein, 11 aa, Artificial Sequence
  Description of Artificial Sequence: Synthetic peptide
KETINEEAAEW

SEQ ID NO: 10129 - protein, 11 aa, Artificial Sequence
  Description of Artificial Sequence: Synthetic peptide
QELKNSAISLL

SEQ ID NO: 10130 - protein, 8 aa, Artificial Sequence
  Description of Artificial Sequence: Synthetic peptide
YESPHPKI

SEQ ID NO: 10131 - protein, 11 aa, Artificial Sequence
  Description of Artificial Sequence: Synthetic peptide
AEEVMVRSENL

SEQ ID NO: 10132 - protein, 11 aa, Artificial Sequence
  Description of Artificial Sequence: Synthetic peptide
LEVNIVTDSQY

SEQ ID NO: 10133 - protein, 10 aa, Artificial Sequence
  Description of Artificial Sequence: Synthetic peptide
SESEVVSQII

SEQ ID NO: 10134 - protein, 9 aa, Artificial Sequence
  Description of Artificial Sequence: Synthetic peptide
EELSTLVEM

SEQ ID NO: 10135 - protein, 9 aa, Artificial Sequence
  Description of Artificial Sequence: Synthetic peptide
VTKGLGISY

SEQ ID NO: 10136 - protein, 9 aa, Artificial Sequence
  Description of Artificial Sequence: Synthetic peptide
ITKGLGISY

SEQ ID NO: 10137 - protein, 9 aa, Artificial Sequence
  Description of Artificial Sequence: Synthetic peptide
ATNSVTTAM

SEQ ID NO: 10138 - protein, 10 aa, Artificial Sequence
  Description of Artificial Sequence: Synthetic peptide
ILKEPVHGAY

SEQ ID NO: 10139 - protein, 11 aa, Artificial Sequence
  Description of Artificial Sequence: Synthetic peptide
KSINLGPGQAF

SEQ ID NO: 10140 - protein, 10 aa, Artificial Sequence
  Description of Artificial Sequence: Synthetic peptide
ILKEPVHGVY

SEQ ID NO: 10141 - protein, 10 aa, Artificial Sequence
  Description of Artificial Sequence: Synthetic peptide
AINSSQNETF

SEQ ID NO: 10142 - protein, 10 aa, Artificial Sequence
  Description of Artificial Sequence: Synthetic peptide
SINLGPGQAF

SEQ ID NO: 10143 - protein, 9 aa, Artificial Sequence
  Description of Artificial Sequence: Synthetic peptide
QIKPPLPSV

SEQ ID NO: 10144 - protein, 9 aa, Artificial Sequence
  Description of Artificial Sequence: Synthetic peptide
RQRPGTVSF

SEQ ID NO: 10145 - protein, 9 aa, Artificial Sequence
  Description of Artificial Sequence: Synthetic peptide
FLGTAGSTM

SEQ ID NO: 10146 - protein, 10 aa, Artificial Sequence
  Description of Artificial Sequence: Synthetic peptide
FTKKGLGVSY

SEQ ID NO: 10147 - protein, 9 aa, Artificial Sequence
  Description of Artificial Sequence: Synthetic peptide
GQKAIGTVL

SEQ ID NO: 10148 - protein, 8 aa, Artificial Sequence
  Description of Artificial Sequence: Synthetic peptide
GQMVHQAL

SEQ ID NO: 10149 - protein, 9 aa, Artificial Sequence
  Description of Artificial Sequence: Synthetic peptide
YQSNPPPSL

SEQ ID NO: 10150 - protein, 8 aa, Artificial Sequence
  Description of Artificial Sequence: Synthetic peptide
HKAIGTVL

SEQ ID NO: 10151 - protein, 8 aa, Artificial Sequence
  Description of Artificial Sequence: Synthetic peptide
HQAAMQML

SEQ ID NO: 10152 - protein, 9 aa, Artificial Sequence
  Description of Artificial Sequence: Synthetic peptide
HQAISPRTL

SEQ ID NO: 10153 - protein, 9 aa, Artificial Sequence
  Description of Artificial Sequence: Synthetic peptide
KALGPGATL

SEQ ID NO: 10154 - protein, 9 aa, Artificial Sequence
  Description of Artificial Sequence: Synthetic peptide
TRIGPGQAL

SEQ ID NO: 10155 - protein, 9 aa, Artificial Sequence
  Description of Artificial Sequence: Synthetic peptide
IKPVVSTQL

SEQ ID NO: 10156 - protein, 8 aa, Artificial Sequence
  Description of Artificial Sequence: Synthetic peptide
AKNIIVQL

SEQ ID NO: 10157 - protein, 9 aa, Artificial Sequence
  Description of Artificial Sequence: Synthetic peptide
RAIEAQQHL

SEQ ID NO: 10158 - protein, 8 aa, Artificial Sequence
  Description of Artificial Sequence: Synthetic peptide
CQVKGEAL

SEQ ID NO: 10159 - protein, 10 aa, Artificial Sequence
  Description of Artificial Sequence: Synthetic peptide
SLFGNDPLSQ

SEQ ID NO: 10160 - protein, 8 aa, Artificial Sequence
  Description of Artificial Sequence: Synthetic peptide
KQLQARVL

SEQ ID NO: 10161 - protein, 10 aa, Artificial Sequence
  Description of Artificial Sequence: Synthetic peptide
GVVESMNNQL

SEQ ID NO: 10162 - protein, 9 aa, Artificial Sequence
  Description of Artificial Sequence: Synthetic peptide
SEFNLPPVV

SEQ ID NO: 10163 - protein, 10 aa, Artificial Sequence
  Description of Artificial Sequence: Synthetic peptide
AEWDKTLQQV

SEQ ID NO: 10164 - protein, 9 aa, Artificial Sequence
  Description of Artificial Sequence: Synthetic peptide
NESVPINCI

SEQ ID NO: 10165 - protein, 9 aa, Artificial Sequence
  Description of Artificial Sequence: Synthetic peptide
REIENYTGV

SEQ ID NO: 10166 - protein, 9 aa, Artificial Sequence
  Description of Artificial Sequence: Synthetic peptide
KEIDNYTGV

SEQ ID NO: 10167 - protein, 9 aa, Artificial Sequence
  Description of Artificial Sequence: Synthetic peptide
SESEIVNQI

SEQ ID NO: 10168 - protein, 8 aa, Artificial Sequence
  Description of Artificial Sequence: Synthetic peptide
YESPHPKI

SEQ ID NO: 10169 - protein, 9 aa, Artificial Sequence
  Description of Artificial Sequence: Synthetic peptide
SESEVVSQI

SEQ ID NO: 10170 - protein, 9 aa, Artificial Sequence
  Description of Artificial Sequence: Synthetic peptide
SESELVNQI

SEQ ID NO: 10171 - protein, 8 aa, Artificial Sequence
  Description of Artificial Sequence: Synthetic peptide
YETEAHNI

SEQ ID NO: 10172 - protein, 9 aa, Artificial Sequence
  Description of Artificial Sequence: Synthetic peptide
SESELVSQI

SEQ ID NO: 10173 - protein, 10 aa, Artificial Sequence
  Description of Artificial Sequence: Synthetic peptide
CEYPAGHNKV

SEQ ID NO: 10174 - protein, 9 aa, Artificial Sequence
  Description of Artificial Sequence: Synthetic peptide
TEMEKEGKI

SEQ ID NO: 10175 - protein, 10 aa, Artificial Sequence
  Description of Artificial Sequence: Synthetic peptide
AEIFGFGEEI

SEQ ID NO: 10176 - protein, 10 aa, Artificial Sequence
  Description of Artificial Sequence: Synthetic peptide
AEIFGLGEEI

SEQ ID NO: 10177 - protein, 10 aa, Artificial Sequence
  Description of Artificial Sequence: Synthetic peptide
KEIDNYTGVI

SEQ ID NO: 10178 - protein, 8 aa, Artificial Sequence
  Description of Artificial Sequence: Synthetic peptide
SEVVSQII

SEQ ID NO: 10179 - protein, 10 aa, Artificial Sequence
  Description of Artificial Sequence: Synthetic peptide
CEYQAGHNKV

SEQ ID NO: 10180 - protein, 10 aa, Artificial Sequence
  Description of Artificial Sequence: Synthetic peptide
REIENYTGVI

SEQ ID NO: 10181 - protein, 11 aa, Artificial Sequence
  Description of Artificial Sequence: Synthetic peptide
AEAMSQATNSV

SEQ ID NO: 10182 - protein, 10 aa, Artificial Sequence
  Description of Artificial Sequence: Synthetic peptide
EEIKSLYNTV

SEQ ID NO: 10183 - protein, 10 aa, Artificial Sequence
  Description of Artificial Sequence: Synthetic peptide
TETNNSTITI

SEQ ID NO: 10184 - protein, 10 aa, Artificial Sequence
  Description of Artificial Sequence: Synthetic peptide
EELKSLFNTV

SEQ ID NO: 10185 - protein, 9 aa, Artificial Sequence
  Description of Artificial Sequence: Synthetic peptide
AEVIPSETG

SEQ ID NO: 10186 - protein, 10 aa, Artificial Sequence
  Description of Artificial Sequence: Synthetic peptide
AEAMSQATNV

SEQ ID NO: 10187 - protein, 8 aa, Artificial Sequence
  Description of Artificial Sequence: Synthetic peptide
IENYTGVI

SEQ ID NO: 10188 - protein, 9 aa, Artificial Sequence
  Description of Artificial Sequence: Synthetic peptide
AERQGQGTV

SEQ ID NO: 10189 - protein, 9 aa, Artificial Sequence
  Description of Artificial Sequence: Synthetic peptide
QELYPLTSL

SEQ ID NO: 10190 - protein, 9 aa, Artificial Sequence
  Description of Artificial Sequence: Synthetic peptide
REIDNYTEL

SEQ ID NO: 10191 - protein, 8 aa, Artificial Sequence
  Description of Artificial Sequence: Synthetic peptide
SEIVNQII

SEQ ID NO: 10192 - protein, 11 aa, Artificial Sequence
  Description of Artificial Sequence: Synthetic peptide
AELELAENREI

SEQ ID NO: 10193 - protein, 8 aa, Artificial Sequence
  Description of Artificial Sequence: Synthetic peptide
SELVSQII

SEQ ID NO: 10194 - protein, 9 aa, Artificial Sequence
  Description of Artificial Sequence: Synthetic peptide
MEDPERQVL

SEQ ID NO: 10195 - protein, 9 aa, Artificial Sequence
  Description of Artificial Sequence: Synthetic peptide
REFPSEQTP

SEQ ID NO: 10196 - protein, 8 aa, Artificial Sequence
  Description of Artificial Sequence: Synthetic peptide
DEDLLKTI

SEQ ID NO: 10197 - protein, 8 aa, Artificial Sequence
  Description of Artificial Sequence: Synthetic peptide
AEQLWVTI

SEQ ID NO: 10198 - protein, 9 aa, Artificial Sequence
  Description of Artificial Sequence: Synthetic peptide
IEICGQKAI

SEQ ID NO: 10199 - protein, 9 aa, Artificial Sequence
  Description of Artificial Sequence: Synthetic peptide
FEEPVPLQL

SEQ ID NO: 10200 - protein, 9 aa, Artificial Sequence
  Description of Artificial Sequence: Synthetic peptide
REIDNYTGL

SEQ ID NO: 10201 - protein, 10 aa, Artificial Sequence
  Description of Artificial Sequence: Synthetic peptide
REIDNYTGLI

SEQ ID NO: 10202 - protein, 8 aa, Artificial Sequence
  Description of Artificial Sequence: Synthetic peptide
TETNNSTI

SEQ ID NO: 10203 - protein, 9 aa, Artificial Sequence
  Description of Artificial Sequence: Synthetic peptide
QEVGKAMYA

SEQ ID NO: 10204 - protein, 10 aa, Artificial Sequence
  Description of Artificial Sequence: Synthetic peptide
AESFGFGEEI

SEQ ID NO: 10205 - protein, 9 aa, Artificial Sequence
  Description of Artificial Sequence: Synthetic peptide
SELEKEGKI

SEQ ID NO: 10206 - protein, 10 aa, Artificial Sequence
  Description of Artificial Sequence: Synthetic peptide
TELQKQITKI

SEQ ID NO: 10207 - protein, 9 aa, Artificial Sequence
  Description of Artificial Sequence: Synthetic peptide
SESAIRKAI

SEQ ID NO: 10208 - protein, 9 aa, Artificial Sequence
  Description of Artificial Sequence: Synthetic peptide
AEAMSQATA

SEQ ID NO: 10209 - protein, 9 aa, Artificial Sequence
  Description of Artificial Sequence: Synthetic peptide
REFPSEQTP

SEQ ID NO: 10210 - protein, 9 aa, Artificial Sequence
  Description of Artificial Sequence: Synthetic peptide
IEVKDTKEA

SEQ ID NO: 10211 - protein, 9 aa, Artificial Sequence
  Description of Artificial Sequence: Synthetic peptide
LEKEPIVGA

SEQ ID NO: 10212 - protein, 10 aa, Artificial Sequence
  Description of Artificial Sequence: Synthetic peptide
SEFNLPPVVA

SEQ ID NO: 10213 - protein, 9 aa, Artificial Sequence
  Description of Artificial Sequence: Synthetic peptide
SEFNLPPVV

SEQ ID NO: 10214 - protein, 9 aa, Artificial Sequence
  Description of Artificial Sequence: Synthetic peptide
LEKEPIIGA

SEQ ID NO: 10215 - protein, 10 aa, Artificial Sequence
  Description of Artificial Sequence: Synthetic peptide
AEVTGDIRKA

SEQ ID NO: 10216 - protein, 9 aa, Artificial Sequence
  Description of Artificial Sequence: Synthetic peptide
AETFYVDGA

SEQ ID NO: 10217 - protein, 11 aa, Artificial Sequence
  Description of Artificial Sequence: Synthetic peptide
AEWDKTLQQVA

SEQ ID NO: 10218 - protein, 9 aa, Artificial Sequence
  Description of Artificial Sequence: Synthetic peptide
EEVGFPVTP

SEQ ID NO: 10219 - protein, 10 aa, Artificial Sequence
  Description of Artificial Sequence: Synthetic peptide
SEVHIPLGEA

SEQ ID NO: 10220 - protein, 10 aa, Artificial Sequence
  Description of Artificial Sequence: Synthetic peptide
TEIIPLTKEA

SEQ ID NO: 10221 - protein, 9 aa, Artificial Sequence
  Description of Artificial Sequence: Synthetic peptide
RVIEIIQRA

SEQ ID NO: 10222 - protein, 9 aa, Artificial Sequence
  Description of Artificial Sequence: Synthetic peptide
KVIGDIRQA

SEQ ID NO: 10223 - protein, 10 aa, Artificial Sequence
  Description of Artificial Sequence: Synthetic peptide
RELPSEQTRA

SEQ ID NO: 10224 - protein, 8 aa, Artificial Sequence
  Description of Artificial Sequence: Synthetic peptide
TEVIPLTA

SEQ ID NO: 10225 - protein, 9 aa, Artificial Sequence
  Description of Artificial Sequence: Synthetic peptide
VVAKEIVAC

SEQ ID NO: 10226 - protein, 9 aa, Artificial Sequence
  Description of Artificial Sequence: Synthetic peptide
VVSQIIEQL

SEQ ID NO: 10227 - protein, 9 aa, Artificial Sequence
  Description of Artificial Sequence: Synthetic peptide
QEVGKAMYA

SEQ ID NO: 10228 - protein, 10 aa, Artificial Sequence
  Description of Artificial Sequence: Synthetic peptide
TEVIPLTKEA

SEQ ID NO: 10229 - protein, 10 aa, Artificial Sequence
  Description of Artificial Sequence: Synthetic peptide
AEWDKTLQQV

SEQ ID NO: 10230 - protein, 9 aa, Artificial Sequence
  Description of Artificial Sequence: Synthetic peptide
TETLLVQNA

SEQ ID NO: 10231 - protein, 10 aa, Artificial Sequence
  Description of Artificial Sequence: Synthetic peptide
TEVIPLTAEA

SEQ ID NO: 10232 - protein, 9 aa, Artificial Sequence
  Description of Artificial Sequence: Synthetic peptide
LVSQIIEQL

SEQ ID NO: 10233 - protein, 10 aa, Artificial Sequence
  Description of Artificial Sequence: Synthetic peptide
AEAMSQATNA

SEQ ID NO: 10234 - protein, 10 aa, Artificial Sequence
  Description of Artificial Sequence: Synthetic peptide
AETFYVDGAA

SEQ ID NO: 10235 - protein, 9 aa, Artificial Sequence
  Description of Artificial Sequence: Synthetic peptide
ATLEEMMTA

SEQ ID NO: 10236 - protein, 9 aa, Artificial Sequence
  Description of Artificial Sequence: Synthetic peptide
REIENYTGV

SEQ ID NO: 10237 - protein, 9 aa, Artificial Sequence
  Description of Artificial Sequence: Synthetic peptide
AMFLGFLGA

SEQ ID NO: 10238 - protein, 9 aa, Artificial Sequence
  Description of Artificial Sequence: Synthetic peptide
CTTSVITQA

SEQ ID NO: 10239 - protein, 11 aa, Artificial Sequence
  Description of Artificial Sequence: Synthetic peptide
TQIDPGLADQL

SEQ ID NO: 10240 - protein, 9 aa, Artificial Sequence
  Description of Artificial Sequence: Synthetic peptide
ASVTLTVQA

SEQ ID NO: 10241 - protein, 10 aa, Artificial Sequence
  Description of Artificial Sequence: Synthetic peptide
REQAEHLKTA

SEQ ID NO: 10242 - protein, 9 aa, Artificial Sequence
  Description of Artificial Sequence: Synthetic peptide
LEGKGILVA

SEQ ID NO: 10243 - protein, 9 aa, Artificial Sequence
  Description of Artificial Sequence: Synthetic peptide
RIIEIIQRA

SEQ ID NO: 10244 - protein, 10 aa, Artificial Sequence
  Description of Artificial Sequence: Synthetic peptide
REFPSEQTPS

SEQ ID NO: 10245 - protein, 9 aa, Artificial Sequence
  Description of Artificial Sequence: Synthetic peptide
EEVGFPVRP

SEQ ID NO: 10246 - protein, 9 aa, Artificial Sequence
  Description of Artificial Sequence: Synthetic peptide
AVAEGTDRV

SEQ ID NO: 10247 - protein, 9 aa, Artificial Sequence
  Description of Artificial Sequence: Synthetic peptide
TEIIPLTKE

SEQ ID NO: 10248 - protein, 10 aa, Artificial Sequence
  Description of Artificial Sequence: Synthetic peptide
GELSPKQTRA

SEQ ID NO: 10249 - protein, 11 aa, Artificial Sequence
  Description of Artificial Sequence: Synthetic peptide
AEWDRLHPVQA

SEQ ID NO: 10250 - protein, 9 aa, Artificial Sequence
  Description of Artificial Sequence: Synthetic peptide
GETNSLLHP

SEQ ID NO: 10251 - protein, 9 aa, Artificial Sequence
  Description of Artificial Sequence: Synthetic peptide
KEIDNYTGV

SEQ ID NO: 10252 - protein, 8 aa, Artificial Sequence
  Description of Artificial Sequence: Synthetic peptide
TAFTISSI

SEQ ID NO: 10253 - protein, 9 aa, Artificial Sequence
  Description of Artificial Sequence: Synthetic peptide
FPISPIATV

SEQ ID NO: 10254 - protein, 9 aa, Artificial Sequence
  Description of Artificial Sequence: Synthetic peptide
FPISPIETV

SEQ ID NO: 10255 - protein, 8 aa, Artificial Sequence
  Description of Artificial Sequence: Synthetic peptide
VPNETITI

SEQ ID NO: 10256 - protein, 9 aa, Artificial Sequence
  Description of Artificial Sequence: Synthetic peptide
EAMSQATNV

SEQ ID NO: 10257 - protein, 9 aa, Artificial Sequence
  Description of Artificial Sequence: Synthetic peptide
SAVSLFNTI

SEQ ID NO: 10258 - protein, 8 aa, Artificial Sequence
  Description of Artificial Sequence: Synthetic peptide
TAIAALVI

SEQ ID NO: 10259 - protein, 8 aa, Artificial Sequence
  Description of Artificial Sequence: Synthetic peptide
VPMEPKEV

SEQ ID NO: 10260 - protein, 9 aa, Artificial Sequence
  Description of Artificial Sequence: Synthetic peptide
LPPIIAKEI

SEQ ID NO: 10261 - protein, 9 aa, Artificial Sequence
  Description of Artificial Sequence: Synthetic peptide
IAALVIASI

SEQ ID NO: 10262 - protein, 10 aa, Artificial Sequence
  Description of Artificial Sequence: Synthetic peptide
IPYNPQSQGV

SEQ ID NO: 10263 - protein, 8 aa, Artificial Sequence
  Description of Artificial Sequence: Synthetic peptide
TPLEITAI

SEQ ID NO: 10264 - protein, 9 aa, Artificial Sequence
  Description of Artificial Sequence: Synthetic peptide
LPSVVAKEI

SEQ ID NO: 10265 - protein, 8 aa, Artificial Sequence
  Description of Artificial Sequence: Synthetic peptide
VALVVALI

SEQ ID NO: 10266 - protein, 9 aa, Artificial Sequence
  Description of Artificial Sequence: Synthetic peptide
LPPVVAKEI

SEQ ID NO: 10267 - protein, 8 aa, Artificial Sequence
  Description of Artificial Sequence: Synthetic peptide
APPIAGLI

SEQ ID NO: 10268 - protein, 8 aa, Artificial Sequence
  Description of Artificial Sequence: Synthetic peptide
IAIAALVV

SEQ ID NO: 10269 - protein, 8 aa, Artificial Sequence
  Description of Artificial Sequence: Synthetic peptide
VPVDPKEV

SEQ ID NO: 10270 - protein, 9 aa, Artificial Sequence
  Description of Artificial Sequence: Synthetic peptide
TALIAPKQI

SEQ ID NO: 10271 - protein, 8 aa, Artificial Sequence
  Description of Artificial Sequence: Synthetic peptide
VPVDPQEV

SEQ ID NO: 10272 - protein, 9 aa, Artificial Sequence
  Description of Artificial Sequence: Synthetic peptide
NPPVPVGEI

SEQ ID NO: 10273 - protein, 9 aa, Artificial Sequence
  Description of Artificial Sequence: Synthetic peptide
IPLGDARLV

SEQ ID NO: 10274 - protein, 8 aa, Artificial Sequence
  Description of Artificial Sequence: Synthetic peptide
QPLEILAI

SEQ ID NO: 10275 - protein, 8 aa, Artificial Sequence
  Description of Artificial Sequence: Synthetic peptide
TAYFILKL

SEQ ID NO: 10276 - protein, 9 aa, Artificial Sequence
  Description of Artificial Sequence: Synthetic peptide
YAPPIAGLI

SEQ ID NO: 10277 - protein, 9 aa, Artificial Sequence
  Description of Artificial Sequence: Synthetic peptide
VGFPVTPQV

SEQ ID NO: 10278 - protein, 8 aa, Artificial Sequence
  Description of Artificial Sequence: Synthetic peptide
YATYATNI

SEQ ID NO: 10279 - protein, 8 aa, Artificial Sequence
  Description of Artificial Sequence: Synthetic peptide
YPAGHNKV

SEQ ID NO: 10280 - protein, 9 aa, Artificial Sequence
  Description of Artificial Sequence: Synthetic peptide
VALVAALII

SEQ ID NO: 10281 - protein, 9 aa, Artificial Sequence
  Description of Artificial Sequence: Synthetic peptide
NPPIPVGEI

SEQ ID NO: 10282 - protein, 11 aa, Artificial Sequence
  Description of Artificial Sequence: Synthetic peptide
IPYNPQSQGVV

SEQ ID NO: 10283 - protein, 8 aa, Artificial Sequence
  Description of Artificial Sequence: Synthetic peptide
IAALVVAI

SEQ ID NO: 10284 - protein, 8 aa, Artificial Sequence
  Description of Artificial Sequence: Synthetic peptide
SPVSILDI

SEQ ID NO: 10285 - protein, 8 aa, Artificial Sequence
  Description of Artificial Sequence: Synthetic peptide
VALVAALI

SEQ ID NO: 10286 - protein, 10 aa, Artificial Sequence
  Description of Artificial Sequence: Synthetic peptide
IPLGEARLVV

SEQ ID NO: 10287 - protein, 8 aa, Artificial Sequence
  Description of Artificial Sequence: Synthetic peptide
VSFNLPQI

SEQ ID NO: 10288 - protein, 9 aa, Artificial Sequence
  Description of Artificial Sequence: Synthetic peptide
HPVHAGPVA

SEQ ID NO: 10289 - protein, 9 aa, Artificial Sequence
  Description of Artificial Sequence: Synthetic peptide
HPVQAGPVA

SEQ ID NO: 10290 - protein, 9 aa, Artificial Sequence
  Description of Artificial Sequence: Synthetic peptide
FPISPIATV

SEQ ID NO: 10291 - protein, 9 aa, Artificial Sequence
  Description of Artificial Sequence: Synthetic peptide
FPISPIETV

SEQ ID NO: 10292 - protein, 9 aa, Artificial Sequence
  Description of Artificial Sequence: Synthetic peptide
EPIGLAPTA

SEQ ID NO: 10293 - protein, 9 aa, Artificial Sequence
  Description of Artificial Sequence: Synthetic peptide
HPVHAGPIA

SEQ ID NO: 10294 - protein, 10 aa, Artificial Sequence
  Description of Artificial Sequence: Synthetic peptide
TPLEITAIAA

SEQ ID NO: 10295 - protein, 9 aa, Artificial Sequence
  Description of Artificial Sequence: Synthetic peptide
TPLEITAIA

SEQ ID NO: 10296 - protein, 9 aa, Artificial Sequence
  Description of Artificial Sequence: Synthetic peptide
QPLGIIAIA

SEQ ID NO: 10297 - protein, 10 aa, Artificial Sequence
  Description of Artificial Sequence: Synthetic peptide
EPIGLAPTAA

SEQ ID NO: 10298 - protein, 11 aa, Artificial Sequence
  Description of Artificial Sequence: Synthetic peptide
LPSVVAKEIVA

SEQ ID NO: 10299 - protein, 10 aa, Artificial Sequence
  Description of Artificial Sequence: Synthetic peptide
QPLEILAIVA

SEQ ID NO: 10300 - protein, 9 aa, Artificial Sequence
  Description of Artificial Sequence: Synthetic peptide
EPIPIHYCA

SEQ ID NO: 10301 - protein, 9 aa, Artificial Sequence
  Description of Artificial Sequence: Synthetic peptide
HVASGYIEA

SEQ ID NO: 10302 - protein, 10 aa, Artificial Sequence
  Description of Artificial Sequence: Synthetic peptide
QPLGIIAIAA

SEQ ID NO: 10303 - protein, 9 aa, Artificial Sequence
  Description of Artificial Sequence: Synthetic peptide
NPYNTPIFA

SEQ ID NO: 10304 - protein, 9 aa, Artificial Sequence
  Description of Artificial Sequence: Synthetic peptide
HPGSQPSTA

SEQ ID NO: 10305 - protein, 10 aa, Artificial Sequence
  Description of Artificial Sequence: Synthetic peptide
EPLGVAPTRA

SEQ ID NO: 10306 - protein, 11 aa, Artificial Sequence
  Description of Artificial Sequence: Synthetic peptide
FPISPIATVPV

SEQ ID NO: 10307 - protein, 9 aa, Artificial Sequence
  Description of Artificial Sequence: Synthetic peptide
QPLEILAIV

SEQ ID NO: 10308 - protein, 10 aa, Artificial Sequence
  Description of Artificial Sequence: Synthetic peptide
FPSEQTPSRA

SEQ ID NO: 10309 - protein, 11 aa, Artificial Sequence
  Description of Artificial Sequence: Synthetic peptide
LPPVVAKEIVA

SEQ ID NO: 10310 - protein, 10 aa, Artificial Sequence
  Description of Artificial Sequence: Synthetic peptide
EPIGVAPTRA

SEQ ID NO: 10311 - protein, 9 aa, Artificial Sequence
  Description of Artificial Sequence: Synthetic peptide
YPLTSLKSL

SEQ ID NO: 10312 - protein, 9 aa, Artificial Sequence
  Description of Artificial Sequence: Synthetic peptide
DAKSFDTEA

SEQ ID NO: 10313 - protein, 8 aa, Artificial Sequence
  Description of Artificial Sequence: Synthetic peptide
TAFTIPST

SEQ ID NO: 10314 - protein, 11 aa, Artificial Sequence
  Description of Artificial Sequence: Synthetic peptide
FPISPIETVPV

SEQ ID NO: 10315 - protein, 9 aa, Artificial Sequence
  Description of Artificial Sequence: Synthetic peptide
FPDWHNYTP

SEQ ID NO: 10316 - protein, 11 aa, Artificial Sequence
  Description of Artificial Sequence: Synthetic peptide
MLNTVGGHQAA

SEQ ID NO: 10317 - protein, 9 aa, Artificial Sequence
  Description of Artificial Sequence: Synthetic peptide
EAMSQATNA

SEQ ID NO: 10318 - protein, 10 aa, Artificial Sequence
  Description of Artificial Sequence: Synthetic peptide
HPVHAGPIAP

SEQ ID NO: 10319 - protein, 9 aa, Artificial Sequence
  Description of Artificial Sequence: Synthetic peptide
EATTTLFCA

SEQ ID NO: 10320 - protein, 9 aa, Artificial Sequence
  Description of Artificial Sequence: Synthetic peptide
LAIVALVAA

SEQ ID NO: 10321 - protein, 10 aa, Artificial Sequence
  Description of Artificial Sequence: Synthetic peptide
IPIEICGQKA

SEQ ID NO: 10322 - protein, 8 aa, Artificial Sequence
  Description of Artificial Sequence: Synthetic peptide
LAFPQWKA

SEQ ID NO: 10323 - protein, 10 aa, Artificial Sequence
  Description of Artificial Sequence: Synthetic peptide
HPVHAGPVAP

SEQ ID NO: 10324 - protein, 9 aa, Artificial Sequence
  Description of Artificial Sequence: Synthetic peptide
EVIPLTAEA

SEQ ID NO: 10325 - protein, 9 aa, Artificial Sequence
  Description of Artificial Sequence: Synthetic peptide
YPSASLKSL

SEQ ID NO: 10326 - protein, 9 aa, Artificial Sequence
  Description of Artificial Sequence: Synthetic peptide
FPSEQTPSR

SEQ ID NO: 10327 - protein, 8 aa, Artificial Sequence
  Description of Artificial Sequence: Synthetic peptide
VPMEPKEV

SEQ ID NO: 10328 - protein, 9 aa, Artificial Sequence
  Description of Artificial Sequence: Synthetic peptide
HPVQAGPVA

SEQ ID NO: 10329 - protein, 9 aa, Artificial Sequence
  Description of Artificial Sequence: Synthetic peptide
HPVHAGPVA

SEQ ID NO: 10330 - protein, 9 aa, Artificial Sequence
  Description of Artificial Sequence: Synthetic peptide
EPIGLAPTA

SEQ ID NO: 10331 - protein, 9 aa, Artificial Sequence
  Description of Artificial Sequence: Synthetic peptide
IPKQPSSQP

SEQ ID NO: 10332 - protein, 9 aa, Artificial Sequence
  Description of Artificial Sequence: Synthetic peptide
VPKQPSSQP

SEQ ID NO: 10333 - protein, 9 aa, Artificial Sequence
  Description of Artificial Sequence: Synthetic peptide
HPVHAGPIA

SEQ ID NO: 10334 - protein, 9 aa, Artificial Sequence
  Description of Artificial Sequence: Synthetic peptide
FPISPIATV

SEQ ID NO: 10335 - protein, 10 aa, Artificial Sequence
  Description of Artificial Sequence: Synthetic peptide
TPLEITAIAA

SEQ ID NO: 10336 - protein, 9 aa, Artificial Sequence
  Description of Artificial Sequence: Synthetic peptide
FPISPIETV

SEQ ID NO: 10337 - protein, 9 aa, Artificial Sequence
  Description of Artificial Sequence: Synthetic peptide
RPEPTAPPA

SEQ ID NO: 10338 - protein, 9 aa, Artificial Sequence
  Description of Artificial Sequence: Synthetic peptide
QPLGIIAIA

SEQ ID NO: 10339 - protein, 9 aa, Artificial Sequence
  Description of Artificial Sequence: Synthetic peptide
TPLEITAIA

SEQ ID NO: 10340 - protein, 10 aa, Artificial Sequence
  Description of Artificial Sequence: Synthetic peptide
QPLGIIAIAA

SEQ ID NO: 10341 - protein, 10 aa, Artificial Sequence
  Description of Artificial Sequence: Synthetic peptide
RPYNNTRQST

SEQ ID NO: 10342 - protein, 9 aa, Artificial Sequence
  Description of Artificial Sequence: Synthetic peptide
HPVQAGPVA

SEQ ID NO: 10343 - protein, 9 aa, Artificial Sequence
  Description of Artificial Sequence: Synthetic peptide
HPVHAGPVA

SEQ ID NO: 10344 - protein, 10 aa, Artificial Sequence
  Description of Artificial Sequence: Synthetic peptide
TPLEITAIAA

SEQ ID NO: 10345 - protein, 9 aa, Artificial Sequence
  Description of Artificial Sequence: Synthetic peptide
EPIGLAPTA

SEQ ID NO: 10346 - protein, 10 aa, Artificial Sequence
  Description of Artificial Sequence: Synthetic peptide
QPLGIIAIAA

SEQ ID NO: 10347 - protein, 9 aa, Artificial Sequence
  Description of Artificial Sequence: Synthetic peptide
FPISPIATV

SEQ ID NO: 10348 - protein, 9 aa, Artificial Sequence
  Description of Artificial Sequence: Synthetic peptide
FPISPIETV

SEQ ID NO: 10349 - protein, 10 aa, Artificial Sequence
  Description of Artificial Sequence: Synthetic peptide
EPIGLAPTAA

SEQ ID NO: 10350 - protein, 9 aa, Artificial Sequence
  Description of Artificial Sequence: Synthetic peptide
HPVHAGPIA

SEQ ID NO: 10351 - protein, 10 aa, Artificial Sequence
  Description of Artificial Sequence: Synthetic peptide
QPLEILAIVA

SEQ ID NO: 10352 - protein, 9 aa, Artificial Sequence
  Description of Artificial Sequence: Synthetic peptide
TPLEITAIA

SEQ ID NO: 10353 - protein, 9 aa, Artificial Sequence
  Description of Artificial Sequence: Synthetic peptide
QPLGIIAIA

SEQ ID NO: 10354 - protein, 10 aa, Artificial Sequence
  Description of Artificial Sequence: Synthetic peptide
IPAETGQETA

SEQ ID NO: 10355 - protein, 9 aa, Artificial Sequence
  Description of Artificial Sequence: Synthetic peptide
NPYNTPIFA

SEQ ID NO: 10356 - protein, 10 aa, Artificial Sequence
  Description of Artificial Sequence: Synthetic peptide
NPNITNNSSA

SEQ ID NO: 10357 - protein, 11 aa, Artificial Sequence
  Description of Artificial Sequence: Synthetic peptide
LPSVVAKEIVA

SEQ ID NO: 10358 - protein, 9 aa, Artificial Sequence
  Description of Artificial Sequence: Synthetic peptide
RPEPTAPPA

SEQ ID NO: 10359 - protein, 9 aa, Artificial Sequence
  Description of Artificial Sequence: Synthetic peptide
TPIGLGQSL

SEQ ID NO: 10360 - protein, 9 aa, Artificial Sequence
  Description of Artificial Sequence: Synthetic peptide
HPGSQPSTA

SEQ ID NO: 10361 - protein, 10 aa, Artificial Sequence
  Description of Artificial Sequence: Synthetic peptide
IPIEICGQKA

SEQ ID NO: 10362 - protein, 10 aa, Artificial Sequence
  Description of Artificial Sequence: Synthetic peptide
IPSETGQETA

SEQ ID NO: 10363 - protein, 10 aa, Artificial Sequence
  Description of Artificial Sequence: Synthetic peptide
FPSEQTPSRA

SEQ ID NO: 10364 - protein, 10 aa, Artificial Sequence
  Description of Artificial Sequence: Synthetic peptide
IPYNPQSQGV

SEQ ID NO: 10365 - protein, 9 aa, Artificial Sequence
  Description of Artificial Sequence: Synthetic peptide
HPVHAGPVA

SEQ ID NO: 10366 - protein, 9 aa, Artificial Sequence
  Description of Artificial Sequence: Synthetic peptide
HPVQAGPVA

SEQ ID NO: 10367 - protein, 10 aa, Artificial Sequence
  Description of Artificial Sequence: Synthetic peptide
TPLEITAIAA

SEQ ID NO: 10368 - protein, 9 aa, Artificial Sequence
  Description of Artificial Sequence: Synthetic peptide
FPISPIETV

SEQ ID NO: 10369 - protein, 9 aa, Artificial Sequence
  Description of Artificial Sequence: Synthetic peptide
FPISPIATV

SEQ ID NO: 10370 - protein, 10 aa, Artificial Sequence
  Description of Artificial Sequence: Synthetic peptide
QPLGIIAIAA

SEQ ID NO: 10371 - protein, 9 aa, Artificial Sequence
  Description of Artificial Sequence: Synthetic peptide
EPIGLAPTA

SEQ ID NO: 10372 - protein, 9 aa, Artificial Sequence
  Description of Artificial Sequence: Synthetic peptide
HPVHAGPIA

SEQ ID NO: 10373 - protein, 10 aa, Artificial Sequence
  Description of Artificial Sequence: Synthetic peptide
IPYNPQSQGV

SEQ ID NO: 10374 - protein, 10 aa, Artificial Sequence
  Description of Artificial Sequence: Synthetic peptide
APAGFAILKC

SEQ ID NO: 10375 - protein, 10 aa, Artificial Sequence
  Description of Artificial Sequence: Synthetic peptide
EPIGLAPTAA

SEQ ID NO: 10376 - protein, 9 aa, Artificial Sequence
  Description of Artificial Sequence: Synthetic peptide
QPLGIIAIA

SEQ ID NO: 10377 - protein, 9 aa, Artificial Sequence
  Description of Artificial Sequence: Synthetic peptide
TPLEITAIA

SEQ ID NO: 10378 - protein, 11 aa, Artificial Sequence
  Description of Artificial Sequence: Synthetic peptide
LPSVVAKEIVA

SEQ ID NO: 10379 - protein, 10 aa, Artificial Sequence
  Description of Artificial Sequence: Synthetic peptide
QPLEILAIVA

SEQ ID NO: 10380 - protein, 10 aa, Artificial Sequence
  Description of Artificial Sequence: Synthetic peptide
IPAETGQETA

SEQ ID NO: 10381 - protein, 10 aa, Artificial Sequence
  Description of Artificial Sequence: Synthetic peptide
RPVVTVKIGG

SEQ ID NO: 10382 - protein, 9 aa, Artificial Sequence
  Description of Artificial Sequence: Synthetic peptide
RPEPTAPPA

SEQ ID NO: 10383 - protein, 10 aa, Artificial Sequence
  Description of Artificial Sequence: Synthetic peptide
SPEVIPMFSA

SEQ ID NO: 10384 - protein, 9 aa, Artificial Sequence
  Description of Artificial Sequence: Synthetic peptide
TPIGLGQSL

SEQ ID NO: 10385 - protein, 10 aa, Artificial Sequence
  Description of Artificial Sequence: Synthetic peptide
RPLVAIKIGG

SEQ ID NO: 10386 - protein, 10 aa, Artificial Sequence
  Description of Artificial Sequence: Synthetic peptide
IPIEICGQKA

SEQ ID NO: 10387 - protein, 10 aa, Artificial Sequence
  Description of Artificial Sequence: Synthetic peptide
FPSEQTPSRA

SEQ ID NO: 10388 - protein, 10 aa, Artificial Sequence
  Description of Artificial Sequence: Synthetic peptide
RPYNNTRQST

SEQ ID NO: 10389 - protein, 8 aa, Artificial Sequence
  Description of Artificial Sequence: Synthetic peptide
VPMEPKEV

SEQ ID NO: 10390 - protein, 10 aa, Artificial Sequence
  Description of Artificial Sequence: Synthetic peptide
VPNETITIPC

SEQ ID NO: 10391 - protein, 10 aa, Artificial Sequence
  Description of Artificial Sequence: Synthetic peptide
NPNITNNSSA

SEQ ID NO: 10392 - protein, 9 aa, Artificial Sequence
  Description of Artificial Sequence: Synthetic peptide
NPYNTPIFA

SEQ ID NO: 10393 - protein, 11 aa, Artificial Sequence
  Description of Artificial Sequence: Synthetic peptide
KSFDTEAHNIW

SEQ ID NO: 10394 - protein, 9 aa, Artificial Sequence
  Description of Artificial Sequence: Synthetic peptide
TTRLFNSTW

SEQ ID NO: 10395 - protein, 9 aa, Artificial Sequence
  Description of Artificial Sequence: Synthetic peptide
ITLPEKESW

SEQ ID NO: 10396 - protein, 11 aa, Artificial Sequence
  Description of Artificial Sequence: Synthetic peptide
KSYETEAHNIW

SEQ ID NO: 10397 - protein, 10 aa, Artificial Sequence
  Description of Artificial Sequence: Synthetic peptide
GTWDNGTWTW

SEQ ID NO: 10398 - protein, 11 aa, Artificial Sequence
  Description of Artificial Sequence: Synthetic peptide
KSYKTEAHNIW

SEQ ID NO: 10399 - protein, 9 aa, Artificial Sequence
  Description of Artificial Sequence: Synthetic peptide
TSLLFNTTW

SEQ ID NO: 10400 - protein, 9 aa, Artificial Sequence
  Description of Artificial Sequence: Synthetic peptide
FSFPQITLW

SEQ ID NO: 10401 - protein, 11 aa, Artificial Sequence
  Description of Artificial Sequence: Synthetic peptide
KAYKAEAHNIW

SEQ ID NO: 10402 - protein, 9 aa, Artificial Sequence
  Description of Artificial Sequence: Synthetic peptide
STLQEQIGW

SEQ ID NO: 10403 - protein, 9 aa, Artificial Sequence
  Description of Artificial Sequence: Synthetic peptide
ASILAIVVW

SEQ ID NO: 10404 - protein, 10 aa, Artificial Sequence
  Description of Artificial Sequence: Synthetic peptide
VTIYYGVPVW

SEQ ID NO: 10405 - protein, 10 aa, Artificial Sequence
  Description of Artificial Sequence: Synthetic peptide
TTNVPWNSSW

SEQ ID NO: 10406 - protein, 9 aa, Artificial Sequence
  Description of Artificial Sequence: Synthetic peptide
ITKGLGISY

SEQ ID NO: 10407 - protein, 9 aa, Artificial Sequence
  Description of Artificial Sequence: Synthetic peptide
RIKQIINMW

SEQ ID NO: 10408 - protein, 9 aa, Artificial Sequence
  Description of Artificial Sequence: Synthetic peptide
VTKGLGISY

SEQ ID NO: 10409 - protein, 11 aa, Artificial Sequence
  Description of Artificial Sequence: Synthetic peptide
QSIKLPEKESW

SEQ ID NO: 10410 - protein, 9 aa, Artificial Sequence
  Description of Artificial Sequence: Synthetic peptide
RSIRLVNGF

SEQ ID NO: 10411 - protein, 9 aa, Artificial Sequence
  Description of Artificial Sequence: Synthetic peptide
TSGLFNSTW

SEQ ID NO: 10412 - protein, 9 aa, Artificial Sequence
  Description of Artificial Sequence: Synthetic peptide
RSVRLLNGF

SEQ ID NO: 10413 - protein, 8 aa, Artificial Sequence
  Description of Artificial Sequence: Synthetic peptide
ISKKAQGW

SEQ ID NO: 10414 - protein, 11 aa, Artificial Sequence
  Description of Artificial Sequence: Synthetic peptide
TTSTLQEQIGW

SEQ ID NO: 10415 - protein, 11 aa, Artificial Sequence
  Description of Artificial Sequence: Synthetic peptide
VSFSFPQITLW

SEQ ID NO: 10416 - protein, 9 aa, Artificial Sequence
  Description of Artificial Sequence: Synthetic peptide
TQRNYQHLW

SEQ ID NO: 10417 - protein, 10 aa, Artificial Sequence
  Description of Artificial Sequence: Synthetic peptide
KIATESIVIW

SEQ ID NO: 10418 - protein, 11 aa, Artificial Sequence
  Description of Artificial Sequence: Synthetic peptide
KSINLGPGQAF

SEQ ID NO: 10419 - protein, 9 aa, Artificial Sequence
  Description of Artificial Sequence: Synthetic peptide
ISTESIVIW

SEQ ID NO: 10420 - protein, 10 aa, Artificial Sequence
  Description of Artificial Sequence: Synthetic peptide
NTSLLFNTTW

SEQ ID NO: 10421 - protein, 10 aa, Artificial Sequence
  Description of Artificial Sequence: Synthetic peptide
NTTRLFNSTW

SEQ ID NO: 10422 - protein, 10 aa, Artificial Sequence
  Description of Artificial Sequence: Synthetic peptide
VTVYYGVPVW

SEQ ID NO: 10423 - protein, 10 aa, Artificial Sequence
  Description of Artificial Sequence: Synthetic peptide
NTSGLFNSTW

SEQ ID NO: 10424 - protein, 11 aa, Artificial Sequence
  Description of Artificial Sequence: Synthetic peptide
KAFNPEVIPMF

SEQ ID NO: 10425 - protein, 9 aa, Artificial Sequence
  Description of Artificial Sequence: Synthetic peptide
KTEADPFDW

SEQ ID NO: 10426 - protein, 10 aa, Artificial Sequence
  Description of Artificial Sequence: Synthetic peptide
IQNLVERLNW

SEQ ID NO: 10427 - protein, 9 aa, Artificial Sequence
  Description of Artificial Sequence: Synthetic peptide
RVMGIERNY

SEQ ID NO: 10428 - protein, 9 aa, Artificial Sequence
  Description of Artificial Sequence: Synthetic peptide
RVMETQRNY

SEQ ID NO: 10429 - protein, 11 aa, Artificial Sequence
  Description of Artificial Sequence: Synthetic peptide
VSFNLPQITLW

SEQ ID NO: 10430 - protein, 9 aa, Artificial Sequence
  Description of Artificial Sequence: Synthetic peptide
IALEGIVIW

SEQ ID NO: 10431 - protein, 11 aa, Artificial Sequence
  Description of Artificial Sequence: Synthetic peptide
KSLFNTVATLY

SEQ ID NO: 10432 - protein, 10 aa, Artificial Sequence
  Description of Artificial Sequence: Synthetic peptide
KSFDTEAHNI

SEQ ID NO: 10433 - protein, 11 aa, Artificial Sequence
  Description of Artificial Sequence: Synthetic peptide
SVLSGGKLDEW

SEQ ID NO: 10434 - protein, 11 aa, Artificial Sequence
  Description of Artificial Sequence: Synthetic peptide
SVLSGGQLDAW

SEQ ID NO: 10435 - protein, 9 aa, Artificial Sequence
  Description of Artificial Sequence: Synthetic peptide
KTAVQMAVF

SEQ ID NO: 10436 - protein, 10 aa, Artificial Sequence
  Description of Artificial Sequence: Synthetic peptide
TSNLQEQIGW

SEQ ID NO: 10437 - protein, 9 aa, Artificial Sequence
  Description of Artificial Sequence: Synthetic peptide
WSKSSIVGW

SEQ ID NO: 10438 - protein, 10 aa, Artificial Sequence
  Description of Artificial Sequence: Synthetic peptide
RISTESIVIW

SEQ ID NO: 10439 - protein, 9 aa, Artificial Sequence
  Description of Artificial Sequence: Synthetic peptide
QASQDVKNW

SEQ ID NO: 10440 - protein, 10 aa, Artificial Sequence
  Description of Artificial Sequence: Synthetic peptide
ITSEPIPIHY

SEQ ID NO: 10441 - protein, 9 aa, Artificial Sequence
  Description of Artificial Sequence: Synthetic peptide
FSVPLDKEF

SEQ ID NO: 10442 - protein, 11 aa, Artificial Sequence
  Description of Artificial Sequence: Synthetic peptide
KSINLGPGQAF

SEQ ID NO: 10443 - protein, 9 aa, Artificial Sequence
  Description of Artificial Sequence: Synthetic peptide
STLQEQIGW

SEQ ID NO: 10444 - protein, 9 aa, Artificial Sequence
  Description of Artificial Sequence: Synthetic peptide
ITLPEKESW

SEQ ID NO: 10445 - protein, 9 aa, Artificial Sequence
  Description of Artificial Sequence: Synthetic peptide
TSGLFNSTW

SEQ ID NO: 10446 - protein, 9 aa, Artificial Sequence
  Description of Artificial Sequence: Synthetic peptide
SSSQVSQNY

SEQ ID NO: 10447 - protein, 9 aa, Artificial Sequence
  Description of Artificial Sequence: Synthetic peptide
GTEELRSLY

SEQ ID NO: 10448 - protein, 9 aa, Artificial Sequence
  Description of Artificial Sequence: Synthetic peptide
RAIEAQQHL

SEQ ID NO: 10449 - protein, 9 aa, Artificial Sequence
  Description of Artificial Sequence: Synthetic peptide
KALGPQATL

SEQ ID NO: 10450 - protein, 10 aa, Artificial Sequence
  Description of Artificial Sequence: Synthetic peptide
KSFDTEAHNI

SEQ ID NO: 10451 - protein, 9 aa, Artificial Sequence
  Description of Artificial Sequence: Synthetic peptide
NSSQVSQNY

SEQ ID NO: 10452 - protein, 9 aa, Artificial Sequence
  Description of Artificial Sequence: Synthetic peptide
SAVSLFNTI

SEQ ID NO: 10453 - protein, 9 aa, Artificial Sequence
  Description of Artificial Sequence: Synthetic peptide
TSEPIPIHY

SEQ ID NO: 10454 - protein, 9 aa, Artificial Sequence
  Description of Artificial Sequence: Synthetic peptide
GSEEIKSLY

SEQ ID NO: 10455 - protein, 11 aa, Artificial Sequence
  Description of Artificial Sequence: Synthetic peptide
GAINSSQNETF

SEQ ID NO: 10456 - protein, 9 aa, Artificial Sequence
  Description of Artificial Sequence: Synthetic peptide
ATNSVTTAM

SEQ ID NO: 10457 - protein, 9 aa, Artificial Sequence
  Description of Artificial Sequence: Synthetic peptide
VTKGLGISY

SEQ ID NO: 10458 - protein, 9 aa, Artificial Sequence
  Description of Artificial Sequence: Synthetic peptide
TSLLFNTTW

SEQ ID NO: 10459 - protein, 9 aa, Artificial Sequence
  Description of Artificial Sequence: Synthetic peptide
KTAVQMAVF

SEQ ID NO: 10460 - protein, 9 aa, Artificial Sequence
  Description of Artificial Sequence: Synthetic peptide
TSAVPNETI

SEQ ID NO: 10461 - protein, 9 aa, Artificial Sequence
  Description of Artificial Sequence: Synthetic peptide
AANNAACAW

SEQ ID NO: 10462 - protein, 10 aa, Artificial Sequence
  Description of Artificial Sequence: Synthetic peptide
RAIEAQQHLL

SEQ ID NO: 10463 - protein, 9 aa, Artificial Sequence
  Description of Artificial Sequence: Synthetic peptide
ITKGLGISY

SEQ ID NO: 10464 - protein, 8 aa, Artificial Sequence
  Description of Artificial Sequence: Synthetic peptide
GQGVSIEW

SEQ ID NO: 10465 - protein, 9 aa, Artificial Sequence
  Description of Artificial Sequence: Synthetic peptide
KALGPGATL

SEQ ID NO: 10466 - protein, 9 aa, Artificial Sequence
  Description of Artificial Sequence: Synthetic peptide
YSTQIDPGL

SEQ ID NO: 10467 - protein, 9 aa, Artificial Sequence
  Description of Artificial Sequence: Synthetic peptide
TINEEAAEW

SEQ ID NO: 10468 - protein, 8 aa, Artificial Sequence
  Description of Artificial Sequence: Synthetic peptide
NSPTSREL

SEQ ID NO: 10469 - protein, 9 aa, Artificial Sequence
  Description of Artificial Sequence: Synthetic peptide
YSPLSLQTL

SEQ ID NO: 10470 - protein, 8 aa, Artificial Sequence
  Description of Artificial Sequence: Synthetic peptide
NSPTSRDL

SEQ ID NO: 10471 - protein, 9 aa, Artificial Sequence
  Description of Artificial Sequence: Synthetic peptide
YSPVSILDI

SEQ ID NO: 10472 - protein, 9 aa, Artificial Sequence
  Description of Artificial Sequence: Synthetic peptide
AGPVAPGQL

SEQ ID NO: 10473 - protein, 9 aa, Artificial Sequence
  Description of Artificial Sequence: Synthetic peptide
FSVPLHEDF

SEQ ID NO: 10474 - protein, 9 aa, Artificial Sequence
  Description of Artificial Sequence: Synthetic peptide
VTKGLGISY

SEQ ID NO: 10475 - protein, 10 aa, Artificial Sequence
  Description of Artificial Sequence: Synthetic peptide
FTKKGLGVSY

SEQ ID NO: 10476 - protein, 9 aa, Artificial Sequence
  Description of Artificial Sequence: Synthetic peptide
ITKGLGISY

SEQ ID NO: 10477 - protein, 9 aa, Artificial Sequence
  Description of Artificial Sequence: Synthetic peptide
TSEPIPIHY

SEQ ID NO: 10478 - protein, 9 aa, Artificial Sequence
  Description of Artificial Sequence: Synthetic peptide
DARLVVTTY

SEQ ID NO: 10479 - protein, 9 aa, Artificial Sequence
  Description of Artificial Sequence: Synthetic peptide
VTKGLGISY

SEQ ID NO: 10480 - protein, 9 aa, Artificial Sequence
  Description of Artificial Sequence: Synthetic peptide
ITKGLGISY

SEQ ID NO: 10481 - protein, 9 aa, Artificial Sequence
  Description of Artificial Sequence: Synthetic peptide
GSEEIKSLY

SEQ ID NO: 10482 - protein, 9 aa, Artificial Sequence
  Description of Artificial Sequence: Synthetic peptide
GTEELRSLY

SEQ ID NO: 10483 - protein, 9 aa, Artificial Sequence
  Description of Artificial Sequence: Synthetic peptide
LADQLIHMY

SEQ ID NO: 10484 - protein, 8 aa, Artificial Sequence
  Description of Artificial Sequence: Synthetic peptide
VLDVGDAY

SEQ ID NO: 10485 - protein, 9 aa, Artificial Sequence
  Description of Artificial Sequence: Synthetic peptide
KALGPGATL

SEQ ID NO: 10486 - protein, 9 aa, Artificial Sequence
  Description of Artificial Sequence: Synthetic peptide
RAIEAQQHL

SEQ ID NO: 10487 - protein, 9 aa, Artificial Sequence
  Description of Artificial Sequence: Synthetic peptide
AALDLSHFL

SEQ ID NO: 10488 - protein, 9 aa, Artificial Sequence
  Description of Artificial Sequence: Synthetic peptide
VAIKIGGQL

SEQ ID NO: 10489 - protein, 9 aa, Artificial Sequence
  Description of Artificial Sequence: Synthetic peptide
YQSNPPPSL

SEQ ID NO: 10490 - protein, 9 aa, Artificial Sequence
  Description of Artificial Sequence: Synthetic peptide
VSVEPPAIL

SEQ ID NO: 10491 - protein, 9 aa, Artificial Sequence
  Description of Artificial Sequence: Synthetic peptide
ISVESPAVL

SEQ ID NO: 10492 - protein, 9 aa, Artificial Sequence
  Description of Artificial Sequence: Synthetic peptide
VAIKIGGQL

SEQ ID NO: 10493 - protein, 9 aa, Artificial Sequence
  Description of Artificial Sequence: Synthetic peptide
RAIEAQQHL

SEQ ID NO: 10494 - protein, 9 aa, Artificial Sequence
  Description of Artificial Sequence: Synthetic peptide
KALGPGATL

SEQ ID NO: 10495 - protein, 9 aa, Artificial Sequence
  Description of Artificial Sequence: Synthetic peptide
AALDLSHFL

SEQ ID NO: 10496 - protein, 9 aa, Artificial Sequence
  Description of Artificial Sequence: Synthetic peptide
YQSNPPPSL

SEQ ID NO: 10497 - protein, 9 aa, Artificial Sequence
  Description of Artificial Sequence: Synthetic peptide
FQQGKAREL

SEQ ID NO: 10498 - protein, 9 aa, Artificial Sequence
  Description of Artificial Sequence: Synthetic peptide
VSVEPPAIL

SEQ ID NO: 10499 - protein, 8 aa, Artificial Sequence
  Description of Artificial Sequence: Synthetic peptide
HSRIGITL

SEQ ID NO: 10500 - protein, 9 aa, Artificial Sequence
  Description of Artificial Sequence: Synthetic peptide
ATDIQTKEL

SEQ ID NO: 10501 - protein, 9 aa, Artificial Sequence
  Description of Artificial Sequence: Synthetic peptide
ISVESPAVL

SEQ ID NO: 10502 - protein, 9 aa, Artificial Sequence
  Description of Artificial Sequence: Synthetic peptide
SAEPVPLQL

SEQ ID NO: 10503 - protein, 9 aa, Artificial Sequence
  Description of Artificial Sequence: Synthetic peptide
LFDAIAIAV

SEQ ID NO: 10504 - protein, 9 aa, Artificial Sequence
  Description of Artificial Sequence: Synthetic peptide
QYDQIPIEI

SEQ ID NO: 10505 - protein, 9 aa, Artificial Sequence
  Description of Artificial Sequence: Synthetic peptide
QYDQILIEI

SEQ ID NO: 10506 - protein, 9 aa, Artificial Sequence
  Description of Artificial Sequence: Synthetic peptide
ASDLQTTEL

SEQ ID NO: 10507 - protein, 9 aa, Artificial Sequence
  Description of Artificial Sequence: Synthetic peptide
VLDNVTENF

SEQ ID NO: 10508 - protein, 8 aa, Artificial Sequence
  Description of Artificial Sequence: Synthetic peptide
HTDNGSNF

SEQ ID NO: 10509 - protein, 9 aa, Artificial Sequence
  Description of Artificial Sequence: Synthetic peptide
SAEPVPLQL

SEQ ID NO: 10510 - protein, 8 aa, Artificial Sequence
  Description of Artificial Sequence: Synthetic peptide
AVDLSHFL

SEQ ID NO: 10511 - protein, 9 aa, Artificial Sequence
  Description of Artificial Sequence: Synthetic peptide
IQDNSEIKV

SEQ ID NO: 10512 - protein, 9 aa, Artificial Sequence
  Description of Artificial Sequence: Synthetic peptide
VLDVGDAYF

SEQ ID NO: 10513 - protein, 10 aa, Artificial Sequence
  Description of Artificial Sequence: Synthetic peptide
TADTGSSSQV

SEQ ID NO: 10514 - protein, 9 aa, Artificial Sequence
  Description of Artificial Sequence: Synthetic peptide
IQDNSDIKV

SEQ ID NO: 10515 - protein, 9 aa, Artificial Sequence
  Description of Artificial Sequence: Synthetic peptide
QRPLVTIKI

SEQ ID NO: 10516 - protein, 9 aa, Artificial Sequence
  Description of Artificial Sequence: Synthetic peptide
QRPVVTVKI

SEQ ID NO: 10517 - protein, 9 aa, Artificial Sequence
  Description of Artificial Sequence: Synthetic peptide
LRPGGSKKY

SEQ ID NO: 10518 - protein, 9 aa, Artificial Sequence
  Description of Artificial Sequence: Synthetic peptide
QRPLVAIKI

SEQ ID NO: 10519 - protein, 8 aa, Artificial Sequence
  Description of Artificial Sequence: Synthetic peptide
NANTAIMM

SEQ ID NO: 10520 - protein, 9 aa, Artificial Sequence
  Description of Artificial Sequence: Synthetic peptide
DARLVVTTY

SEQ ID NO: 10521 - protein, 9 aa, Artificial Sequence
  Description of Artificial Sequence: Synthetic peptide
SASSLFDAI

SEQ ID NO: 10522 - protein, 9 aa, Artificial Sequence
  Description of Artificial Sequence: Synthetic peptide
SAVSLFNTI

SEQ ID NO: 10523 - protein, 9 aa, Artificial Sequence
  Description of Artificial Sequence: Synthetic peptide
SAEPVPLQL

SEQ ID NO: 10524 - protein, 9 aa, Artificial Sequence
  Description of Artificial Sequence: Synthetic peptide
DIVSPRCEY

SEQ ID NO: 10525 - protein, 9 aa, Artificial Sequence
  Description of Artificial Sequence: Synthetic peptide
FLGAAGSTM

SEQ ID NO: 10526 - protein, 9 aa, Artificial Sequence
  Description of Artificial Sequence: Synthetic peptide
TVLDVGDAY

SEQ ID NO: 10527 - protein, 9 aa, Artificial Sequence
  Description of Artificial Sequence: Synthetic peptide
AALDLSHFL

SEQ ID NO: 10528 - protein, 9 aa, Artificial Sequence
  Description of Artificial Sequence: Synthetic peptide
IITDSQYAL

SEQ ID NO: 10529 - protein, 9 aa, Artificial Sequence
  Description of Artificial Sequence: Synthetic peptide
IVTDSQYAL

SEQ ID NO: 10530 - protein, 9 aa, Artificial Sequence
  Description of Artificial Sequence: Synthetic peptide
VVESMNREL

SEQ ID NO: 10531 - protein, 11 aa, Artificial Sequence
  Description of Artificial Sequence: Synthetic peptide
VAEGTDRAIEL

SEQ ID NO: 10532 - protein, 9 aa, Artificial Sequence
  Description of Artificial Sequence: Synthetic peptide
VTLNCSDEL

SEQ ID NO: 10533 - protein, 10 aa, Artificial Sequence
  Description of Artificial Sequence: Synthetic peptide
EVNIITDSQY

SEQ ID NO: 10534 - protein, 9 aa, Artificial Sequence
  Description of Artificial Sequence: Synthetic peptide
ASDLQTTEL

SEQ ID NO: 10535 - protein, 8 aa, Artificial Sequence
  Description of Artificial Sequence: Synthetic peptide
AVDLSHFL

SEQ ID NO: 10536 - protein, 9 aa, Artificial Sequence
  Description of Artificial Sequence: Synthetic peptide
ATDIQTKEL

SEQ ID NO: 10537 - protein, 9 aa, Artificial Sequence
  Description of Artificial Sequence: Synthetic peptide
IIDIIASDL

SEQ ID NO: 10538 - protein, 8 aa, Artificial Sequence
  Description of Artificial Sequence: Synthetic peptide
ALDLSHFL

SEQ ID NO: 10539 - protein, 9 aa, Artificial Sequence
  Description of Artificial Sequence: Synthetic peptide
VLDNVTENF

SEQ ID NO: 10540 - protein, 9 aa, Artificial Sequence
  Description of Artificial Sequence: Synthetic peptide
VAEKLGNLL

SEQ ID NO: 10541 - protein, 9 aa, Artificial Sequence
  Description of Artificial Sequence: Synthetic peptide
GIDNSSNRL

SEQ ID NO: 10542 - protein, 10 aa, Artificial Sequence
  Description of Artificial Sequence: Synthetic peptide
TADTGSSSQV

SEQ ID NO: 10543 - protein, 10 aa, Artificial Sequence
  Description of Artificial Sequence: Synthetic peptide
AADTGDNKQV

SEQ ID NO: 10544 - protein, 9 aa, Artificial Sequence
  Description of Artificial Sequence: Synthetic peptide
TQDFWEVQL

SEQ ID NO: 10545 - protein, 9 aa, Artificial Sequence
  Description of Artificial Sequence: Synthetic peptide
SAEPVPLQL

SEQ ID NO: 10546 - protein, 8 aa, Artificial Sequence
  Description of Artificial Sequence: Synthetic peptide
GQMVHQAL

SEQ ID NO: 10547 - protein, 9 aa, Artificial Sequence
  Description of Artificial Sequence: Synthetic peptide
GQKAIGTVL

SEQ ID NO: 10548 - protein, 9 aa, Artificial Sequence
  Description of Artificial Sequence: Synthetic peptide
YQSNPPPSL

SEQ ID NO: 10549 - protein, 9 aa, Artificial Sequence
  Description of Artificial Sequence: Synthetic peptide
NAKNIIVQL

SEQ ID NO: 10550 - protein, 9 aa, Artificial Sequence
  Description of Artificial Sequence: Synthetic peptide
VTKGLGISY

SEQ ID NO: 10551 - protein, 10 aa, Artificial Sequence
  Description of Artificial Sequence: Synthetic peptide
VSFEPIPIHY

SEQ ID NO: 10552 - protein, 9 aa, Artificial Sequence
  Description of Artificial Sequence: Synthetic peptide
SAVSLFNTI

SEQ ID NO: 10553 - protein, 9 aa, Artificial Sequence
  Description of Artificial Sequence: Synthetic peptide
ITKGLGISY

SEQ ID NO: 10554 - protein, 9 aa, Artificial Sequence
  Description of Artificial Sequence: Synthetic peptide
NAKNIIAHL

SEQ ID NO: 10555 - protein, 9 aa, Artificial Sequence
  Description of Artificial Sequence: Synthetic peptide
VAALIIAIV

SEQ ID NO: 10556 - protein, 9 aa, Artificial Sequence
  Description of Artificial Sequence: Synthetic peptide
IYQEQYKNL

SEQ ID NO: 10557 - protein, 9 aa, Artificial Sequence
  Description of Artificial Sequence: Synthetic peptide
IYQEPFKNL

SEQ ID NO: 10558 - protein, 9 aa, Artificial Sequence
  Description of Artificial Sequence: Synthetic peptide
TYQIYQEQY

SEQ ID NO: 10559 - protein, 8 aa, Artificial Sequence
  Description of Artificial Sequence: Synthetic peptide
SFNVTTVL

SEQ ID NO: 10560 - protein, 10 aa, Artificial Sequence
  Description of Artificial Sequence: Synthetic peptide
AFQQGKAREL

SEQ ID NO: 10561 - protein, 10 aa, Artificial Sequence
  Description of Artificial Sequence: Synthetic peptide
GFLGTAGSTM

SEQ ID NO: 10562 - protein, 9 aa, Artificial Sequence
  Description of Artificial Sequence: Synthetic peptide
LYNTVVTLY

SEQ ID NO: 10563 - protein, 9 aa, Artificial Sequence
  Description of Artificial Sequence: Synthetic peptide
LYNTVATLY

SEQ ID NO: 10564 - protein, 8 aa, Artificial Sequence
  Description of Artificial Sequence: Synthetic peptide
LYNTVATL

SEQ ID NO: 10565 - protein, 9 aa, Artificial Sequence
  Description of Artificial Sequence: Synthetic peptide
IFRPGGGDM

SEQ ID NO: 10566 - protein, 10 aa, Artificial Sequence
  Description of Artificial Sequence: Synthetic peptide
AFPQGKAGEL

SEQ ID NO: 10567 - protein, 8 aa, Artificial Sequence
  Description of Artificial Sequence: Synthetic peptide
LYNTVVTL

SEQ ID NO: 10568 - protein, 9 aa, Artificial Sequence
  Description of Artificial Sequence: Synthetic peptide
TYQIYQEPF

SEQ ID NO: 10569 - protein, 10 aa, Artificial Sequence
  Description of Artificial Sequence: Synthetic peptide
GFLGAAGSTM

SEQ ID NO: 10570 - protein, 9 aa, Artificial Sequence
  Description of Artificial Sequence: Synthetic peptide
AFEHKARSL

SEQ ID NO: 10571 - protein, 8 aa, Artificial Sequence
  Description of Artificial Sequence: Synthetic peptide
SFNTTTIL

SEQ ID NO: 10572 - protein, 9 aa, Artificial Sequence
  Description of Artificial Sequence: Synthetic peptide
LFNTVATLY

SEQ ID NO: 10573 - protein, 9 aa, Artificial Sequence
  Description of Artificial Sequence: Synthetic peptide
KYHSNWRAM

SEQ ID NO: 10574 - protein, 8 aa, Artificial Sequence
  Description of Artificial Sequence: Synthetic peptide
NYPIVQNL

SEQ ID NO: 10575 - protein, 9 aa, Artificial Sequence
  Description of Artificial Sequence: Synthetic peptide
TYQIYQEQY

SEQ ID NO: 10576 - protein, 9 aa, Artificial Sequence
  Description of Artificial Sequence: Synthetic peptide
IYQEQYKNL

SEQ ID NO: 10577 - protein, 8 aa, Artificial Sequence
  Description of Artificial Sequence: Synthetic peptide
LYNTVATL

SEQ ID NO: 10578 - protein, 9 aa, Artificial Sequence
  Description of Artificial Sequence: Synthetic peptide
IYQEPFKNL

SEQ ID NO: 10579 - protein, 10 aa, Artificial Sequence
  Description of Artificial Sequence: Synthetic peptide
GFLGTAGSTM

SEQ ID NO: 10580 - protein, 10 aa, Artificial Sequence
  Description of Artificial Sequence: Synthetic peptide
GFLGAAGSTM

SEQ ID NO: 10581 - protein, 8 aa, Artificial Sequence
  Description of Artificial Sequence: Synthetic peptide
SFNVTTVL

SEQ ID NO: 10582 - protein, 8 aa, Artificial Sequence
  Description of Artificial Sequence: Synthetic peptide
LYNTVVTL

SEQ ID NO: 10583 - protein, 9 aa, Artificial Sequence
  Description of Artificial Sequence: Synthetic peptide
MYAPPIEGF

SEQ ID NO: 10584 - protein, 9 aa, Artificial Sequence
  Description of Artificial Sequence: Synthetic peptide
TYQIYQEPF

SEQ ID NO: 10585 - protein, 9 aa, Artificial Sequence
  Description of Artificial Sequence: Synthetic peptide
LYNTVATLY

SEQ ID NO: 10586 - protein, 8 aa, Artificial Sequence
  Description of Artificial Sequence: Synthetic peptide
TYSVAEQL

SEQ ID NO: 10587 - protein, 9 aa, Artificial Sequence
  Description of Artificial Sequence: Synthetic peptide
LYNTVVTLY

SEQ ID NO: 10588 - protein, 9 aa, Artificial Sequence
  Description of Artificial Sequence: Synthetic peptide
TSNITGLLL

SEQ ID NO: 10589 - protein, 9 aa, Artificial Sequence
  Description of Artificial Sequence: Synthetic peptide
SSNITGLLL

SEQ ID NO: 10590 - protein, 9 aa, Artificial Sequence
  Description of Artificial Sequence: Synthetic peptide
GAASVTLTV

SEQ ID NO: 10591 - protein, 9 aa, Artificial Sequence
  Description of Artificial Sequence: Synthetic peptide
ANSPTSREL

SEQ ID NO: 10592 - protein, 9 aa, Artificial Sequence
  Description of Artificial Sequence: Synthetic peptide
SATQWNKTL

SEQ ID NO: 10593 - protein, 9 aa, Artificial Sequence
  Description of Artificial Sequence: Synthetic peptide
VTGDIRKAY

SEQ ID NO: 10594 - protein, 8 aa, Artificial Sequence
  Description of Artificial Sequence: Synthetic peptide
VASTKEAL

SEQ ID NO: 10595 - protein, 9 aa, Artificial Sequence
  Description of Artificial Sequence: Synthetic peptide
VSSGIRKVL

SEQ ID NO: 10596 - protein, 9 aa, Artificial Sequence
  Description of Artificial Sequence: Synthetic peptide
SATQWNKTL

SEQ ID NO: 10597 - protein, 9 aa, Artificial Sequence
  Description of Artificial Sequence: Synthetic peptide
QTTELQKQI

SEQ ID NO: 10598 - protein, 9 aa, Artificial Sequence
  Description of Artificial Sequence: Synthetic peptide
NAKNIIVQL

SEQ ID NO: 10599 - protein, 9 aa, Artificial Sequence
  Description of Artificial Sequence: Synthetic peptide
ANSPTSREL

SEQ ID NO: 10600 - protein, 10 aa, Artificial Sequence
  Description of Artificial Sequence: Synthetic peptide
IATDIQTKEL

SEQ ID NO: 10601 - protein, 9 aa, Artificial Sequence
  Description of Artificial Sequence: Synthetic peptide
SAVSLFNTI

SEQ ID NO: 10602 - protein, 9 aa, Artificial Sequence
  Description of Artificial Sequence: Synthetic peptide
RAIEAQQHL

SEQ ID NO: 10603 - protein, 9 aa, Artificial Sequence
  Description of Artificial Sequence: Synthetic peptide
ARILAVESY

SEQ ID NO: 10604 - protein, 9 aa, Artificial Sequence
  Description of Artificial Sequence: Synthetic peptide
ARVLAVESY

SEQ ID NO: 10605 - protein, 9 aa, Artificial Sequence
  Description of Artificial Sequence: Synthetic peptide
GAASVTLTV

SEQ ID NO: 10606 - protein, 11 aa, Artificial Sequence
  Description of Artificial Sequence: Synthetic peptide
AEQASQDVKNW

SEQ ID NO: 10607 - protein, 9 aa, Artificial Sequence
  Description of Artificial Sequence: Synthetic peptide
SAVSLFNTI

SEQ ID NO: 10608 - protein, 9 aa, Artificial Sequence
  Description of Artificial Sequence: Synthetic peptide
SASSLFDAI

SEQ ID NO: 10609 - protein, 11 aa, Artificial Sequence
  Description of Artificial Sequence: Synthetic peptide
AEIQKQGQDQW

SEQ ID NO: 10610 - protein, 9 aa, Artificial Sequence
  Description of Artificial Sequence: Synthetic peptide
YETEAHNIW

SEQ ID NO: 10611 - protein, 10 aa, Artificial Sequence
  Description of Artificial Sequence: Synthetic peptide
ERQGQGTVSF

SEQ ID NO: 10612 - protein, 9 aa, Artificial Sequence
  Description of Artificial Sequence: Synthetic peptide
EEINLPGKW

SEQ ID NO: 10613 - protein, 11 aa, Artificial Sequence
  Description of Artificial Sequence: Synthetic peptide
AEVTGDIRKAY

SEQ ID NO: 10614 - protein, 9 aa, Artificial Sequence
  Description of Artificial Sequence: Synthetic peptide
TRIGPGQAL

SEQ ID NO: 10615 - protein, 9 aa, Artificial Sequence
  Description of Artificial Sequence: Synthetic peptide
EEMNLPGKW

SEQ ID NO: 10616 - protein, 9 aa, Artificial Sequence
  Description of Artificial Sequence: Synthetic peptide
IAARIVELL

SEQ ID NO: 10617 - protein, 8 aa, Artificial Sequence
  Description of Artificial Sequence: Synthetic peptide
IAARIVEL

SEQ ID NO: 10618 - protein, 9 aa, Artificial Sequence
  Description of Artificial Sequence: Synthetic peptide
IAVRIVELL

SEQ ID NO: 10619 - protein, 9 aa, Artificial Sequence
  Description of Artificial Sequence: Synthetic peptide
SAEPVPLQL

SEQ ID NO: 10620 - protein, 9 aa, Artificial Sequence
  Description of Artificial Sequence: Synthetic peptide
YATNIIGNI

SEQ ID NO: 10621 - protein, 9 aa, Artificial Sequence
  Description of Artificial Sequence: Synthetic peptide
AALDLSHFL

SEQ ID NO: 10622 - protein, 9 aa, Artificial Sequence
  Description of Artificial Sequence: Synthetic peptide
LIAARIVEL

SEQ ID NO: 10623 - protein, 9 aa, Artificial Sequence
  Description of Artificial Sequence: Synthetic peptide
IAARIVDLL

SEQ ID NO: 10624 - protein, 10 aa, Artificial Sequence
  Description of Artificial Sequence: Synthetic peptide
RAIGLGALFL

SEQ ID NO: 10625 - protein, 8 aa, Artificial Sequence
  Description of Artificial Sequence: Synthetic peptide
IATVPVKL

SEQ ID NO: 10626 - protein, 9 aa, Artificial Sequence
  Description of Artificial Sequence: Synthetic peptide
MIIGGLIGL

SEQ ID NO: 10627 - protein, 10 aa, Artificial Sequence
  Description of Artificial Sequence: Synthetic peptide
AADKGVSQNY

SEQ ID NO: 10628 - protein, 10 aa, Artificial Sequence
  Description of Artificial Sequence: Synthetic peptide
DTELLKAVKY

SEQ ID NO: 10629 - protein, 9 aa, Artificial Sequence
  Description of Artificial Sequence: Synthetic peptide
GSEELKSLY

SEQ ID NO: 10630 - protein, 9 aa, Artificial Sequence
  Description of Artificial Sequence: Synthetic peptide
GSEELRSLY

SEQ ID NO: 10631 - protein, 9 aa, Artificial Sequence
  Description of Artificial Sequence: Synthetic peptide
PTDPNPQEV

SEQ ID NO: 10632 - protein, 8 aa, Artificial Sequence
  Description of Artificial Sequence: Synthetic peptide
VLDVGDAY

SEQ ID NO: 10633 - protein, 10 aa, Artificial Sequence
  Description of Artificial Sequence: Synthetic peptide
VTVLDVGDAY

SEQ ID NO: 10634 - protein, 9 aa, Artificial Sequence
  Description of Artificial Sequence: Synthetic peptide
RTPPTPPAA

SEQ ID NO: 10635 - protein, 9 aa, Artificial Sequence
  Description of Artificial Sequence: Synthetic peptide
ILAEAMSQA

SEQ ID NO: 10636 - protein, 10 aa, Artificial Sequence
  Description of Artificial Sequence: Synthetic peptide
KVVEIEPLGV

SEQ ID NO: 10637 - protein, 10 aa, Artificial Sequence
  Description of Artificial Sequence: Synthetic peptide
FVPKQPISQA

SEQ ID NO: 10638 - protein, 9 aa, Artificial Sequence
  Description of Artificial Sequence: Synthetic peptide
IIAQIQPSI

SEQ ID NO: 10639 - protein, 9 aa, Artificial Sequence
  Description of Artificial Sequence: Synthetic peptide
ALGEVGPFI

SEQ ID NO: 10640 - protein, 10 aa, Artificial Sequence
  Description of Artificial Sequence: Synthetic peptide
ILEELKNEAV

SEQ ID NO: 10641 - protein, 9 aa, Artificial Sequence
  Description of Artificial Sequence: Synthetic peptide
SLAEGEIVI

SEQ ID NO: 10642 - protein, 9 aa, Artificial Sequence
  Description of Artificial Sequence: Synthetic peptide
TLSDQSSTL

SEQ ID NO: 10643 - protein, 10 aa, Artificial Sequence
  Description of Artificial Sequence: Synthetic peptide
SLPKQPLSQA

SEQ ID NO: 10644 - protein, 9 aa, Artificial Sequence
  Description of Artificial Sequence: Synthetic peptide
ILREPVHGV

SEQ ID NO: 10645 - protein, 10 aa, Artificial Sequence
  Description of Artificial Sequence: Synthetic peptide
KLVPVDPDEV

SEQ ID NO: 10646 - protein, 10 aa, Artificial Sequence
  Description of Artificial Sequence: Synthetic peptide
KLVPVDPEEV

SEQ ID NO: 10647 - protein, 9 aa, Artificial Sequence
  Description of Artificial Sequence: Synthetic peptide
YTAFTIPSV

SEQ ID NO: 10648 - protein, 9 aa, Artificial Sequence
  Description of Artificial Sequence: Synthetic peptide
GLADQLIHI

SEQ ID NO: 10649 - protein, 9 aa, Artificial Sequence
  Description of Artificial Sequence: Synthetic peptide
ALTDIVPLT

SEQ ID NO: 10650 - protein, 9 aa, Artificial Sequence
  Description of Artificial Sequence: Synthetic peptide
AVLSIVNRV

SEQ ID NO: 10651 - protein, 9 aa, Artificial Sequence
  Description of Artificial Sequence: Synthetic peptide
VLAEAMSQA

SEQ ID NO: 10652 - protein, 9 aa, Artificial Sequence
  Description of Artificial Sequence: Synthetic peptide
ILKEPVHGV

SEQ ID NO: 10653 - protein, 9 aa, Artificial Sequence
  Description of Artificial Sequence: Synthetic peptide
QLTEAVQKI

SEQ ID NO: 10654 - protein, 9 aa, Artificial Sequence
  Description of Artificial Sequence: Synthetic peptide
IVTDSQYAL

SEQ ID NO: 10655 - protein, 9 aa, Artificial Sequence
  Description of Artificial Sequence: Synthetic peptide
ILAEAMSQA

SEQ ID NO: 10656 - protein, 9 aa, Artificial Sequence
  Description of Artificial Sequence: Synthetic peptide
ILREPVHGV

SEQ ID NO: 10657 - protein, 10 aa, Artificial Sequence
  Description of Artificial Sequence: Synthetic peptide
KVVEIEPLGV

SEQ ID NO: 10658 - protein, 9 aa, Artificial Sequence
  Description of Artificial Sequence: Synthetic peptide
FISGDINNL

SEQ ID NO: 10659 - protein, 9 aa, Artificial Sequence
  Description of Artificial Sequence: Synthetic peptide
TLKEDPEAI

SEQ ID NO: 10660 - protein, 9 aa, Artificial Sequence
  Description of Artificial Sequence: Synthetic peptide
SISERILVA

SEQ ID NO: 10661 - protein, 9 aa, Artificial Sequence
  Description of Artificial Sequence: Synthetic peptide
TLSDQSSTL

SEQ ID NO: 10662 - protein, 9 aa, Artificial Sequence
  Description of Artificial Sequence: Synthetic peptide
GLYPPLASL

SEQ ID NO: 10663 - protein, 10 aa, Artificial Sequence
  Description of Artificial Sequence: Synthetic peptide
ALTDIVPLTA

SEQ ID NO: 10664 - protein, 9 aa, Artificial Sequence
  Description of Artificial Sequence: Synthetic peptide
ELYPPLASL

SEQ ID NO: 10665 - protein, 9 aa, Artificial Sequence
  Description of Artificial Sequence: Synthetic peptide
AIIGDIRKA

SEQ ID NO: 10666 - protein, 9 aa, Artificial Sequence
  Description of Artificial Sequence: Synthetic peptide
KTKPPLPSV

SEQ ID NO: 10667 - protein, 10 aa, Artificial Sequence
  Description of Artificial Sequence: Synthetic peptide
ALSDRILSSC

SEQ ID NO: 10668 - protein, 10 aa, Artificial Sequence
  Description of Artificial Sequence: Synthetic peptide
GMIGLRIVFA

SEQ ID NO: 10669 - protein, 9 aa, Artificial Sequence
  Description of Artificial Sequence: Synthetic peptide
FIPGDINNL

SEQ ID NO: 10670 - protein, 9 aa, Artificial Sequence
  Description of Artificial Sequence: Synthetic peptide
SLFNTVAVL

SEQ ID NO: 10671 - protein, 10 aa, Artificial Sequence
  Description of Artificial Sequence: Synthetic peptide
FVPKQPISQA

SEQ ID NO: 10672 - protein, 10 aa, Artificial Sequence
  Description of Artificial Sequence: Synthetic peptide
ALTDMVPLTA

SEQ ID NO: 10673 - protein, 10 aa, Artificial Sequence
  Description of Artificial Sequence: Synthetic peptide
SLPKQPLSQA

SEQ ID NO: 10674 - protein, 9 aa, Artificial Sequence
  Description of Artificial Sequence: Synthetic peptide
LLAIGIAAL

SEQ ID NO: 10675 - protein, 9 aa, Artificial Sequence
  Description of Artificial Sequence: Synthetic peptide
ELTDAVQKV

SEQ ID NO: 10676 - protein, 10 aa, Artificial Sequence
  Description of Artificial Sequence: Synthetic peptide
HLRDFILIAA

SEQ ID NO: 10677 - protein, 9 aa, Artificial Sequence
  Description of Artificial Sequence: Synthetic peptide
ALFLRFLGA

SEQ ID NO: 10678 - protein, 9 aa, Artificial Sequence
  Description of Artificial Sequence: Synthetic peptide
SLSPRTLNA

SEQ ID NO: 10679 - protein, 9 aa, Artificial Sequence
  Description of Artificial Sequence: Synthetic peptide
TVLSIVNRV

SEQ ID NO: 10680 - protein, 9 aa, Artificial Sequence
  Description of Artificial Sequence: Synthetic peptide
LLNATAIAV

SEQ ID NO: 10681 - protein, 10 aa, Artificial Sequence
  Description of Artificial Sequence: Synthetic peptide
YLKDQQLLGL

SEQ ID NO: 10682 - protein, 9 aa, Artificial Sequence
  Description of Artificial Sequence: Synthetic peptide
ELRSLFNTV

SEQ ID NO: 10683 - protein, 9 aa, Artificial Sequence
  Description of Artificial Sequence: Synthetic peptide
ILKEPVHGA

SEQ ID NO: 10684 - protein, 9 aa, Artificial Sequence
  Description of Artificial Sequence: Synthetic peptide
GLADQLIHI

SEQ ID NO: 10685 - protein, 9 aa, Artificial Sequence
  Description of Artificial Sequence: Synthetic peptide
SLYNTIAVL

SEQ ID NO: 10686 - protein, 9 aa, Artificial Sequence
  Description of Artificial Sequence: Synthetic peptide
AVLSIVNRV

SEQ ID NO: 10687 - protein, 8 aa, Artificial Sequence
  Description of Artificial Sequence: Synthetic peptide
VLSIVNRV

SEQ ID NO: 10688 - protein, 9 aa, Artificial Sequence
  Description of Artificial Sequence: Synthetic peptide
ALFLGFLGA

SEQ ID NO: 10689 - protein, 10 aa, Artificial Sequence
  Description of Artificial Sequence: Synthetic peptide
ALFLGFLGAA

SEQ ID NO: 10690 - protein, 9 aa, Artificial Sequence
  Description of Artificial Sequence: Synthetic peptide
VLAEAMSQA

SEQ ID NO: 10691 - protein, 9 aa, Artificial Sequence
  Description of Artificial Sequence: Synthetic peptide
GAASLTLTV

SEQ ID NO: 10692 - protein, 9 aa, Artificial Sequence
  Description of Artificial Sequence: Synthetic peptide
GAASITLTV

SEQ ID NO: 10693 - protein, 10 aa, Artificial Sequence
  Description of Artificial Sequence: Synthetic peptide
GLIGLRIVFA

SEQ ID NO: 10694 - protein, 11 aa, Artificial Sequence
  Description of Artificial Sequence: Synthetic peptide
FLKEKGGLEGL

SEQ ID NO: 10695 - protein, 9 aa, Artificial Sequence
  Description of Artificial Sequence: Synthetic peptide
QLQARVLAV

SEQ ID NO: 10696 - protein, 9 aa, Artificial Sequence
  Description of Artificial Sequence: Synthetic peptide
ILKEPVHGV

SEQ ID NO: 10697 - protein, 9 aa, Artificial Sequence
  Description of Artificial Sequence: Synthetic peptide
ELKSLFNTV

SEQ ID NO: 10698 - protein, 9 aa, Artificial Sequence
  Description of Artificial Sequence: Synthetic peptide
QLTEAVQKI

SEQ ID NO: 10699 - protein, 10 aa, Artificial Sequence
  Description of Artificial Sequence: Synthetic peptide
YLKDQQLLGI

SEQ ID NO: 10700 - protein, 9 aa, Artificial Sequence
  Description of Artificial Sequence: Synthetic peptide
ELKKIIGQV

SEQ ID NO: 10701 - protein, 9 aa, Artificial Sequence
  Description of Artificial Sequence: Synthetic peptide
FISGDINNL

SEQ ID NO: 10702 - protein, 9 aa, Artificial Sequence
  Description of Artificial Sequence: Synthetic peptide
GLYPPLASL

SEQ ID NO: 10703 - protein, 9 aa, Artificial Sequence
  Description of Artificial Sequence: Synthetic peptide
ILREPVHGV

SEQ ID NO: 10704 - protein, 9 aa, Artificial Sequence
  Description of Artificial Sequence: Synthetic peptide
KLSALFYRL

SEQ ID NO: 10705 - protein, 11 aa, Artificial Sequence
  Description of Artificial Sequence: Synthetic peptide
GLLPGEREWHL

SEQ ID NO: 10706 - protein, 9 aa, Artificial Sequence
  Description of Artificial Sequence: Synthetic peptide
SLFNTVAVL

SEQ ID NO: 10707 - protein, 9 aa, Artificial Sequence
  Description of Artificial Sequence: Synthetic peptide
IVNKIIEKL

SEQ ID NO: 10708 - protein, 9 aa, Artificial Sequence
  Description of Artificial Sequence: Synthetic peptide
AIIKILQQL

SEQ ID NO: 10709 - protein, 9 aa, Artificial Sequence
  Description of Artificial Sequence: Synthetic peptide
IITIVVWTI

SEQ ID NO: 10710 - protein, 9 aa, Artificial Sequence
  Description of Artificial Sequence: Synthetic peptide
SIVAFIIAL

SEQ ID NO: 10711 - protein, 10 aa, Artificial Sequence
  Description of Artificial Sequence: Synthetic peptide
KVVEIEPLGV

SEQ ID NO: 10712 - protein, 9 aa, Artificial Sequence
  Description of Artificial Sequence: Synthetic peptide
LLAIGIAAL

SEQ ID NO: 10713 - protein, 9 aa, Artificial Sequence
  Description of Artificial Sequence: Synthetic peptide
RVNALFYKL

SEQ ID NO: 10714 - protein, 9 aa, Artificial Sequence
  Description of Artificial Sequence: Synthetic peptide
NYSNIIYKL

SEQ ID NO: 10715 - protein, 9 aa, Artificial Sequence
  Description of Artificial Sequence: Synthetic peptide
ETLKYLWNL

SEQ ID NO: 10716 - protein, 10 aa, Artificial Sequence
  Description of Artificial Sequence: Synthetic peptide
YLLAIGIAAL

SEQ ID NO: 10717 - protein, 9 aa, Artificial Sequence
  Description of Artificial Sequence: Synthetic peptide
LVWDDLRNL

SEQ ID NO: 10718 - protein, 11 aa, Artificial Sequence
  Description of Artificial Sequence: Synthetic peptide
ALFYKLDIVQI

SEQ ID NO: 10719 - protein, 9 aa, Artificial Sequence
  Description of Artificial Sequence: Synthetic peptide
ALFNKTIKF

SEQ ID NO: 10720 - protein, 10 aa, Artificial Sequence
  Description of Artificial Sequence: Synthetic peptide
KLDEWEKIQL

SEQ ID NO: 10721 - protein, 9 aa, Artificial Sequence
  Description of Artificial Sequence: Synthetic peptide
GIAALIVAL

SEQ ID NO: 10722 - protein, 9 aa, Artificial Sequence
  Description of Artificial Sequence: Synthetic peptide
KVHALFYKL

SEQ ID NO: 10723 - protein, 9 aa, Artificial Sequence
  Description of Artificial Sequence: Synthetic peptide
IIAQIQPSI

SEQ ID NO: 10724 - protein, 10 aa, Artificial Sequence
  Description of Artificial Sequence: Synthetic peptide
KQYDNILIEI

SEQ ID NO: 10725 - protein, 9 aa, Artificial Sequence
  Description of Artificial Sequence: Synthetic peptide
FIPGDINNL

SEQ ID NO: 10726 - protein, 9 aa, Artificial Sequence
  Description of Artificial Sequence: Synthetic peptide
ALGEVGPFI

SEQ ID NO: 10727 - protein, 9 aa, Artificial Sequence
  Description of Artificial Sequence: Synthetic peptide
YTAFTIPSL

SEQ ID NO: 10728 - protein, 9 aa, Artificial Sequence
  Description of Artificial Sequence: Synthetic peptide
FIIALIIAI

SEQ ID NO: 10729 - protein, 10 aa, Artificial Sequence
  Description of Artificial Sequence: Synthetic peptide
NLLAIGIAAL

SEQ ID NO: 10730 - protein, 9 aa, Artificial Sequence
  Description of Artificial Sequence: Synthetic peptide
SLNNETPGI

SEQ ID NO: 10731 - protein, 9 aa, Artificial Sequence
  Description of Artificial Sequence: Synthetic peptide
TIVAFIVAL

SEQ ID NO: 10732 - protein, 11 aa, Artificial Sequence
  Description of Artificial Sequence: Synthetic peptide
NLSDNAKTIIV

SEQ ID NO: 10733 - protein, 10 aa, Artificial Sequence
  Description of Artificial Sequence: Synthetic peptide
ALVWDDLRNL

SEQ ID NO: 10734 - protein, 9 aa, Artificial Sequence
  Description of Artificial Sequence: Synthetic peptide
YVLSIVAFI

SEQ ID NO: 10735 - protein, 9 aa, Artificial Sequence
  Description of Artificial Sequence: Synthetic peptide
ELYPPLASL

SEQ ID NO: 10736 - protein, 10 aa, Artificial Sequence
  Description of Artificial Sequence: Synthetic peptide
KQYDHILIEI

SEQ ID NO: 10737 - protein, 9 aa, Artificial Sequence
  Description of Artificial Sequence: Synthetic peptide
FLHGIGQYI

SEQ ID NO: 10738 - protein, 9 aa, Artificial Sequence
  Description of Artificial Sequence: Synthetic peptide
LTLGWCFKL

SEQ ID NO: 10739 - protein, 10 aa, Artificial Sequence
  Description of Artificial Sequence: Synthetic peptide
SLVWDDLRNL

SEQ ID NO: 10740 - protein, 9 aa, Artificial Sequence
  Description of Artificial Sequence: Synthetic peptide
NTVAVLYYV

SEQ ID NO: 10741 - protein, 10 aa, Artificial Sequence
  Description of Artificial Sequence: Synthetic peptide
ALAWDDLRNL

SEQ ID NO: 10742 - protein, 9 aa, Artificial Sequence
  Description of Artificial Sequence: Synthetic peptide
IVTDSQYVL

SEQ ID NO: 10743 - protein, 9 aa, Artificial Sequence
  Description of Artificial Sequence: Synthetic peptide
AVAEWTDRV

SEQ ID NO: 10744 - protein, 9 aa, Artificial Sequence
  Description of Artificial Sequence: Synthetic peptide
NTIAVLYYV

SEQ ID NO: 10745 - protein, 9 aa, Artificial Sequence
  Description of Artificial Sequence: Synthetic peptide
TVLSIVNRV

SEQ ID NO: 10746 - protein, 9 aa, Artificial Sequence
  Description of Artificial Sequence: Synthetic peptide
LLNATAIAV

SEQ ID NO: 10747 - protein, 10 aa, Artificial Sequence
  Description of Artificial Sequence: Synthetic peptide
YLKDQQLLGL

SEQ ID NO: 10748 - protein, 9 aa, Artificial Sequence
  Description of Artificial Sequence: Synthetic peptide
LLNTTAIVV

SEQ ID NO: 10749 - protein, 9 aa, Artificial Sequence
  Description of Artificial Sequence: Synthetic peptide
GLADQLIHI

SEQ ID NO: 10750 - protein, 9 aa, Artificial Sequence
  Description of Artificial Sequence: Synthetic peptide
SLYNTIAVL

SEQ ID NO: 10751 - protein, 9 aa, Artificial Sequence
  Description of Artificial Sequence: Synthetic peptide
ALTDIVPLT

SEQ ID NO: 10752 - protein, 9 aa, Artificial Sequence
  Description of Artificial Sequence: Synthetic peptide
AVLSIVNRV

SEQ ID NO: 10753 - protein, 9 aa, Artificial Sequence
  Description of Artificial Sequence: Synthetic peptide
HLEGKIILV

SEQ ID NO: 10754 - protein, 9 aa, Artificial Sequence
  Description of Artificial Sequence: Synthetic peptide
IVNQIIEQL

SEQ ID NO: 10755 - protein, 9 aa, Artificial Sequence
  Description of Artificial Sequence: Synthetic peptide
ALFYRLDIV

SEQ ID NO: 10756 - protein, 9 aa, Artificial Sequence
  Description of Artificial Sequence: Synthetic peptide
AIIRILQQL

SEQ ID NO: 10757 - protein, 10 aa, Artificial Sequence
  Description of Artificial Sequence: Synthetic peptide
TLWQRPLVTI

SEQ ID NO: 10758 - protein, 9 aa, Artificial Sequence
  Description of Artificial Sequence: Synthetic peptide
LVNQIIEQL

SEQ ID NO: 10759 - protein, 11 aa, Artificial Sequence
  Description of Artificial Sequence: Synthetic peptide
FLKEKGGLEGL

SEQ ID NO: 10760 - protein, 9 aa, Artificial Sequence
  Description of Artificial Sequence: Synthetic peptide
LLQLTVWGI

SEQ ID NO: 10761 - protein, 9 aa, Artificial Sequence
  Description of Artificial Sequence: Synthetic peptide
HLEGKVILV

SEQ ID NO: 10762 - protein, 9 aa, Artificial Sequence
  Description of Artificial Sequence: Synthetic peptide
ILKEPVHGV

SEQ ID NO: 10763 - protein, 9 aa, Artificial Sequence
  Description of Artificial Sequence: Synthetic peptide
TLNAWVKVI

SEQ ID NO: 10764 - protein, 9 aa, Artificial Sequence
  Description of Artificial Sequence: Synthetic peptide
IIAIVVWTI

SEQ ID NO: 10765 - protein, 9 aa, Artificial Sequence
  Description of Artificial Sequence: Synthetic peptide
IVTDSQYAL

SEQ ID NO: 10766 - protein, 11 aa, Artificial Sequence
  Description of Artificial Sequence: Synthetic peptide
VQLGIPHPAGL

SEQ ID NO: 10767 - protein, 10 aa, Artificial Sequence
  Description of Artificial Sequence: Synthetic peptide
RTQDFWEVQL

SEQ ID NO: 10768 - protein, 9 aa, Artificial Sequence
  Description of Artificial Sequence: Synthetic peptide
KLTPLCVTL

SEQ ID NO: 10769 - protein, 9 aa, Artificial Sequence
  Description of Artificial Sequence: Synthetic peptide
FISGDINNL

SEQ ID NO: 10770 - protein, 9 aa, Artificial Sequence
  Description of Artificial Sequence: Synthetic peptide
WTVDDIQKL

SEQ ID NO: 10771 - protein, 9 aa, Artificial Sequence
  Description of Artificial Sequence: Synthetic peptide
FIPGDINNL

SEQ ID NO: 10772 - protein, 9 aa, Artificial Sequence
  Description of Artificial Sequence: Synthetic peptide
FIPGDVNNL

SEQ ID NO: 10773 - protein, 9 aa, Artificial Sequence
  Description of Artificial Sequence: Synthetic peptide
RVIEALQRA

SEQ ID NO: 10774 - protein, 9 aa, Artificial Sequence
  Description of Artificial Sequence: Synthetic peptide
AIIGDIRKA

SEQ ID NO: 10775 - protein, 10 aa, Artificial Sequence
  Description of Artificial Sequence: Synthetic peptide
SQISGESHTV

SEQ ID NO: 10776 - protein, 10 aa, Artificial Sequence
  Description of Artificial Sequence: Synthetic peptide
FVPKQPISQA

SEQ ID NO: 10777 - protein, 9 aa, Artificial Sequence
  Description of Artificial Sequence: Synthetic peptide
RVIEVLQRA

SEQ ID NO: 10778 - protein, 9 aa, Artificial Sequence
  Description of Artificial Sequence: Synthetic peptide
VVAEGTDRV

SEQ ID NO: 10779 - protein, 9 aa, Artificial Sequence
  Description of Artificial Sequence: Synthetic peptide
VVAEGTDRI

SEQ ID NO: 10780 - protein, 10 aa, Artificial Sequence
  Description of Artificial Sequence: Synthetic peptide
SQISGESHAV

SEQ ID NO: 10781 - protein, 9 aa, Artificial Sequence
  Description of Artificial Sequence: Synthetic peptide
ILAEAMSQA

SEQ ID NO: 10782 - protein, 9 aa, Artificial Sequence
  Description of Artificial Sequence: Synthetic peptide
GQYPPLASL

SEQ ID NO: 10783 - protein, 9 aa, Artificial Sequence
  Description of Artificial Sequence: Synthetic peptide
SQANTTIMM

SEQ ID NO: 10784 - protein, 9 aa, Artificial Sequence
  Description of Artificial Sequence: Synthetic peptide
AEWDRLHPA

SEQ ID NO: 10785 - protein, 9 aa, Artificial Sequence
  Description of Artificial Sequence: Synthetic peptide
YTSPIAGNI

SEQ ID NO: 10786 - protein, 9 aa, Artificial Sequence
  Description of Artificial Sequence: Synthetic peptide
TLSDQSSTL

SEQ ID NO: 10787 - protein, 11 aa, Artificial Sequence
  Description of Artificial Sequence: Synthetic peptide
SQISGESHAVL

SEQ ID NO: 10788 - protein, 10 aa, Artificial Sequence
  Description of Artificial Sequence: Synthetic peptide
KVVEIEPLGV

SEQ ID NO: 10789 - protein, 9 aa, Artificial Sequence
  Description of Artificial Sequence: Synthetic peptide
RIIEVLQRA

SEQ ID NO: 10790 - protein, 9 aa, Artificial Sequence
  Description of Artificial Sequence: Synthetic peptide
DTIAINDTL

SEQ ID NO: 10791 - protein, 9 aa, Artificial Sequence
  Description of Artificial Sequence: Synthetic peptide
EQVDRLVSA

SEQ ID NO: 10792 - protein, 9 aa, Artificial Sequence
  Description of Artificial Sequence: Synthetic peptide
IIAQIQPSI

SEQ ID NO: 10793 - protein, 9 aa, Artificial Sequence
  Description of Artificial Sequence: Synthetic peptide
AIIKILQQL

SEQ ID NO: 10794 - protein, 9 aa, Artificial Sequence
  Description of Artificial Sequence: Synthetic peptide
LETEPIVGA

SEQ ID NO: 10795 - protein, 11 aa, Artificial Sequence
  Description of Artificial Sequence: Synthetic peptide
SQISGESHTVL

SEQ ID NO: 10796 - protein, 11 aa, Artificial Sequence
  Description of Artificial Sequence: Synthetic peptide
GSFISGDINNL

SEQ ID NO: 10797 - protein, 11 aa, Artificial Sequence
  Description of Artificial Sequence: Synthetic peptide
TQIDPDLADQL

SEQ ID NO: 10798 - protein, 10 aa, Artificial Sequence
  Description of Artificial Sequence: Synthetic peptide
GEIIGDIRKA

SEQ ID NO: 10799 - protein, 9 aa, Artificial Sequence
  Description of Artificial Sequence: Synthetic peptide
AVAEWTDRV

SEQ ID NO: 10800 - protein, 9 aa, Artificial Sequence
  Description of Artificial Sequence: Synthetic peptide
GAVDLSHFL

SEQ ID NO: 10801 - protein, 9 aa, Artificial Sequence
  Description of Artificial Sequence: Synthetic peptide
TVLSIVNRV

SEQ ID NO: 10802 - protein, 11 aa, Artificial Sequence
  Description of Artificial Sequence: Synthetic peptide
TQIDPGLADQL

SEQ ID NO: 10803 - protein, 9 aa, Artificial Sequence
  Description of Artificial Sequence: Synthetic peptide
VVIQDNSEI

SEQ ID NO: 10804 - protein, 11 aa, Artificial Sequence
  Description of Artificial Sequence: Synthetic peptide
VVIQDNSEIKV

SEQ ID NO: 10805 - protein, 9 aa, Artificial Sequence
  Description of Artificial Sequence: Synthetic peptide
AAVDLSHFL

SEQ ID NO: 10806 - protein, 9 aa, Artificial Sequence
  Description of Artificial Sequence: Synthetic peptide
AVLSIVNRV

SEQ ID NO: 10807 - protein, 9 aa, Artificial Sequence
  Description of Artificial Sequence: Synthetic peptide
IEIKDTKEA

SEQ ID NO: 10808 - protein, 9 aa, Artificial Sequence
  Description of Artificial Sequence: Synthetic peptide
VLAEAMSQA

SEQ ID NO: 10809 - protein, 9 aa, Artificial Sequence
  Description of Artificial Sequence: Synthetic peptide
IVNQIIEQL

SEQ ID NO: 10810 - protein, 9 aa, Artificial Sequence
  Description of Artificial Sequence: Synthetic peptide
GAASITLTV

SEQ ID NO: 10811 - protein, 9 aa, Artificial Sequence
  Description of Artificial Sequence: Synthetic peptide
ASITLTVQA

SEQ ID NO: 10812 - protein, 9 aa, Artificial Sequence
  Description of Artificial Sequence: Synthetic peptide
LVNQIIEQL

SEQ ID NO: 10813 - protein, 9 aa, Artificial Sequence
  Description of Artificial Sequence: Synthetic peptide
ATLEEMMTA

SEQ ID NO: 10814 - protein, 9 aa, Artificial Sequence
  Description of Artificial Sequence: Synthetic peptide
IEVKDTKEA

SEQ ID NO: 10815 - protein, 9 aa, Artificial Sequence
  Description of Artificial Sequence: Synthetic peptide
FTSAAVKAA

SEQ ID NO: 10816 - protein, 9 aa, Artificial Sequence
  Description of Artificial Sequence: Synthetic peptide
RAIEAQQHL

SEQ ID NO: 10817 - protein, 9 aa, Artificial Sequence
  Description of Artificial Sequence: Synthetic peptide
SQIYPGIKV

SEQ ID NO: 10818 - protein, 9 aa, Artificial Sequence
  Description of Artificial Sequence: Synthetic peptide
ILKEPVHGV

SEQ ID NO: 10819 - protein, 9 aa, Artificial Sequence
  Description of Artificial Sequence: Synthetic peptide
QLTEAVQKI

SEQ ID NO: 10820 - protein, 9 aa, Artificial Sequence
  Description of Artificial Sequence: Synthetic peptide
WTVNDIQKL

SEQ ID NO: 10821 - protein, 9 aa, Artificial Sequence
  Description of Artificial Sequence: Synthetic peptide
IVTDSQYAL

SEQ ID NO: 10822 - protein, 10 aa, Artificial Sequence
  Description of Artificial Sequence: Synthetic peptide
SQYALGIIQA

SEQ ID NO: 10823 - protein, 10 aa, Artificial Sequence
  Description of Artificial Sequence: Synthetic peptide
KVVEIEPLGV

SEQ ID NO: 10824 - protein, 9 aa, Artificial Sequence
  Description of Artificial Sequence: Synthetic peptide
FISGDINNL

SEQ ID NO: 10825 - protein, 9 aa, Artificial Sequence
  Description of Artificial Sequence: Synthetic peptide
RVIEALQRA

SEQ ID NO: 10826 - protein, 9 aa, Artificial Sequence
  Description of Artificial Sequence: Synthetic peptide
RVIEVLQRA

SEQ ID NO: 10827 - protein, 9 aa, Artificial Sequence
  Description of Artificial Sequence: Synthetic peptide
GQYPPLASL

SEQ ID NO: 10828 - protein, 9 aa, Artificial Sequence
  Description of Artificial Sequence: Synthetic peptide
IQDNSEIKI

SEQ ID NO: 10829 - protein, 9 aa, Artificial Sequence
  Description of Artificial Sequence: Synthetic peptide
AIIGDIRKA

SEQ ID NO: 10830 - protein, 9 aa, Artificial Sequence
  Description of Artificial Sequence: Synthetic peptide
FIPGDINNL

SEQ ID NO: 10831 - protein, 10 aa, Artificial Sequence
  Description of Artificial Sequence: Synthetic peptide
SQISGESHTV

SEQ ID NO: 10832 - protein, 9 aa, Artificial Sequence
  Description of Artificial Sequence: Synthetic peptide
WTVDDIQKL

SEQ ID NO: 10833 - protein, 9 aa, Artificial Sequence
  Description of Artificial Sequence: Synthetic peptide
RTPPTPPAA

SEQ ID NO: 10834 - protein, 9 aa, Artificial Sequence
  Description of Artificial Sequence: Synthetic peptide
VVAEGTDRV

SEQ ID NO: 10835 - protein, 9 aa, Artificial Sequence
  Description of Artificial Sequence: Synthetic peptide
EQVDRLVSA

SEQ ID NO: 10836 - protein, 9 aa, Artificial Sequence
  Description of Artificial Sequence: Synthetic peptide
ILAEAMSQA

SEQ ID NO: 10837 - protein, 9 aa, Artificial Sequence
  Description of Artificial Sequence: Synthetic peptide
YQLETEPIV

SEQ ID NO: 10838 - protein, 9 aa, Artificial Sequence
  Description of Artificial Sequence: Synthetic peptide
FIPGDVNNL

SEQ ID NO: 10839 - protein, 10 aa, Artificial Sequence
  Description of Artificial Sequence: Synthetic peptide
FVPKQPISQA

SEQ ID NO: 10840 - protein, 9 aa, Artificial Sequence
  Description of Artificial Sequence: Synthetic peptide
GVTDTKEAL

SEQ ID NO: 10841 - protein, 9 aa, Artificial Sequence
  Description of Artificial Sequence: Synthetic peptide
AIIKILQQL

SEQ ID NO: 10842 - protein, 9 aa, Artificial Sequence
  Description of Artificial Sequence: Synthetic peptide
ASDFNIPAV

SEQ ID NO: 10843 - protein, 9 aa, Artificial Sequence
  Description of Artificial Sequence: Synthetic peptide
IIAQIQPSI

SEQ ID NO: 10844 - protein, 9 aa, Artificial Sequence
  Description of Artificial Sequence: Synthetic peptide
DQITIDICG

SEQ ID NO: 10845 - protein, 9 aa, Artificial Sequence
  Description of Artificial Sequence: Synthetic peptide
KQMAVDDCV

SEQ ID NO: 10846 - protein, 9 aa, Artificial Sequence
  Description of Artificial Sequence: Synthetic peptide
ELTDAVQKV

SEQ ID NO: 10847 - protein, 11 aa, Artificial Sequence
  Description of Artificial Sequence: Synthetic peptide
TQIDPDLADQL

SEQ ID NO: 10848 - protein, 9 aa, Artificial Sequence
  Description of Artificial Sequence: Synthetic peptide
IVTDSQYVL

SEQ ID NO: 10849 - protein, 9 aa, Artificial Sequence
  Description of Artificial Sequence: Synthetic peptide
AVAEWTDRV

SEQ ID NO: 10850 - protein, 9 aa, Artificial Sequence
  Description of Artificial Sequence: Synthetic peptide
RTPPAAEGV

SEQ ID NO: 10851 - protein, 9 aa, Artificial Sequence
  Description of Artificial Sequence: Synthetic peptide
GAVDLSHFL

SEQ ID NO: 10852 - protein, 9 aa, Artificial Sequence
  Description of Artificial Sequence: Synthetic peptide
TVLSIVNRV

SEQ ID NO: 10853 - protein, 10 aa, Artificial Sequence
  Description of Artificial Sequence: Synthetic peptide
GVVESINKEL

SEQ ID NO: 10854 - protein, 9 aa, Artificial Sequence
  Description of Artificial Sequence: Synthetic peptide
IQDNSEIKV

SEQ ID NO: 10855 - protein, 11 aa, Artificial Sequence
  Description of Artificial Sequence: Synthetic peptide
VVIQDNSEIKV

SEQ ID NO: 10856 - protein, 11 aa, Artificial Sequence
  Description of Artificial Sequence: Synthetic peptide
TQIDPGLADQL

SEQ ID NO: 10857 - protein, 9 aa, Artificial Sequence
  Description of Artificial Sequence: Synthetic peptide
VVIQDNSEI

SEQ ID NO: 10858 - protein, 9 aa, Artificial Sequence
  Description of Artificial Sequence: Synthetic peptide
AAVDLSHFL

SEQ ID NO: 10859 - protein, 9 aa, Artificial Sequence
  Description of Artificial Sequence: Synthetic peptide
AVLSIVNRV

SEQ ID NO: 10860 - protein, 9 aa, Artificial Sequence
  Description of Artificial Sequence: Synthetic peptide
VLAEAMSQA

SEQ ID NO: 10861 - protein, 9 aa, Artificial Sequence
  Description of Artificial Sequence: Synthetic peptide
IVNQIIEQL

SEQ ID NO: 10862 - protein, 9 aa, Artificial Sequence
  Description of Artificial Sequence: Synthetic peptide
GAASITLTV

SEQ ID NO: 10863 - protein, 9 aa, Artificial Sequence
  Description of Artificial Sequence: Synthetic peptide
SQIYPGIKV

SEQ ID NO: 10864 - protein, 9 aa, Artificial Sequence
  Description of Artificial Sequence: Synthetic peptide
QLTEAVQKI

SEQ ID NO: 10865 - protein, 9 aa, Artificial Sequence
  Description of Artificial Sequence: Synthetic peptide
IVTDSQYAL

SEQ ID NO: 10866 - protein, 9 aa, Artificial Sequence
  Description of Artificial Sequence: Synthetic peptide
GGIGGFIKV

SEQ ID NO: 10867 - protein, 10 aa, Artificial Sequence
  Description of Artificial Sequence: Synthetic peptide
TVLDVGDAYF

SEQ ID NO: 10868 - protein, 9 aa, Artificial Sequence
  Description of Artificial Sequence: Synthetic peptide
FIPGDVNNL

SEQ ID NO: 10869 - protein, 9 aa, Artificial Sequence
  Description of Artificial Sequence: Synthetic peptide
TLDRVKAEL

SEQ ID NO: 10870 - protein, 9 aa, Artificial Sequence
  Description of Artificial Sequence: Synthetic peptide
FIPGDINNL

SEQ ID NO: 10871 - protein, 9 aa, Artificial Sequence
  Description of Artificial Sequence: Synthetic peptide
TVDDIQKLV

SEQ ID NO: 10872 - protein, 9 aa, Artificial Sequence
  Description of Artificial Sequence: Synthetic peptide
GTDRIIEVL

SEQ ID NO: 10873 - protein, 9 aa, Artificial Sequence
  Description of Artificial Sequence: Synthetic peptide
GTDRVIEAL

SEQ ID NO: 10874 - protein, 9 aa, Artificial Sequence
  Description of Artificial Sequence: Synthetic peptide
YVDRFFKVL

SEQ ID NO: 10875 - protein, 9 aa, Artificial Sequence
  Description of Artificial Sequence: Synthetic peptide
ILREPVHGV

SEQ ID NO: 10876 - protein, 9 aa, Artificial Sequence
  Description of Artificial Sequence: Synthetic peptide
FISGDINNL

SEQ ID NO: 10877 - protein, 10 aa, Artificial Sequence
  Description of Artificial Sequence: Synthetic peptide
KVVEIEPLGV

SEQ ID NO: 10878 - protein, 9 aa, Artificial Sequence
  Description of Artificial Sequence: Synthetic peptide
YVDRFFKAL

SEQ ID NO: 10879 - protein, 9 aa, Artificial Sequence
  Description of Artificial Sequence: Synthetic peptide
GTDRVIEVL

SEQ ID NO: 10880 - protein, 9 aa, Artificial Sequence
  Description of Artificial Sequence: Synthetic peptide
TVLSIVNRV

SEQ ID NO: 10881 - protein, 9 aa, Artificial Sequence
  Description of Artificial Sequence: Synthetic peptide
AADNLWVTV

SEQ ID NO: 10882 - protein, 9 aa, Artificial Sequence
  Description of Artificial Sequence: Synthetic peptide
AVLSIVNRV

SEQ ID NO: 10883 - protein, 9 aa, Artificial Sequence
  Description of Artificial Sequence: Synthetic peptide
HLEGKIILV

SEQ ID NO: 10884 - protein, 9 aa, Artificial Sequence
  Description of Artificial Sequence: Synthetic peptide
YVDRFFKTL

SEQ ID NO: 10885 - protein, 9 aa, Artificial Sequence
  Description of Artificial Sequence: Synthetic peptide
HLEGKVILV

SEQ ID NO: 10886 - protein, 9 aa, Artificial Sequence
  Description of Artificial Sequence: Synthetic peptide
ILKEPVHGV

SEQ ID NO: 10887 - protein, 9 aa, Artificial Sequence
  Description of Artificial Sequence: Synthetic peptide
FSPEVIPMF

SEQ ID NO: 10888 - protein, 9 aa, Artificial Sequence
  Description of Artificial Sequence: Synthetic peptide
FISGDINNL

SEQ ID NO: 10889 - protein, 10 aa, Artificial Sequence
  Description of Artificial Sequence: Synthetic peptide
KVVEIEPLGV

SEQ ID NO: 10890 - protein, 9 aa, Artificial Sequence
  Description of Artificial Sequence: Synthetic peptide
RVIEALQRA

SEQ ID NO: 10891 - protein, 9 aa, Artificial Sequence
  Description of Artificial Sequence: Synthetic peptide
AIIGDIRKA

SEQ ID NO: 10892 - protein, 9 aa, Artificial Sequence
  Description of Artificial Sequence: Synthetic peptide
IVNKIIEKL

SEQ ID NO: 10893 - protein, 10 aa, Artificial Sequence
  Description of Artificial Sequence: Synthetic peptide
FVPKQPISQA

SEQ ID NO: 10894 - protein, 9 aa, Artificial Sequence
  Description of Artificial Sequence: Synthetic peptide
RVIEVLQRA

SEQ ID NO: 10895 - protein, 9 aa, Artificial Sequence
  Description of Artificial Sequence: Synthetic peptide
AIIKILQQL

SEQ ID NO: 10896 - protein, 9 aa, Artificial Sequence
  Description of Artificial Sequence: Synthetic peptide
FIPGDINNL

SEQ ID NO: 10897 - protein, 9 aa, Artificial Sequence
  Description of Artificial Sequence: Synthetic peptide
WTVDDIQKL

SEQ ID NO: 10898 - protein, 9 aa, Artificial Sequence
  Description of Artificial Sequence: Synthetic peptide
FIPGDVNNL

SEQ ID NO: 10899 - protein, 9 aa, Artificial Sequence
  Description of Artificial Sequence: Synthetic peptide
KTKPPLPSV

SEQ ID NO: 10900 - protein, 9 aa, Artificial Sequence
  Description of Artificial Sequence: Synthetic peptide
RIIEVLQRA

SEQ ID NO: 10901 - protein, 9 aa, Artificial Sequence
  Description of Artificial Sequence: Synthetic peptide
ILAEAMSQA

SEQ ID NO: 10902 - protein, 11 aa, Artificial Sequence
  Description of Artificial Sequence: Synthetic peptide
GSFISGDINNL

SEQ ID NO: 10903 - protein, 10 aa, Artificial Sequence
  Description of Artificial Sequence: Synthetic peptide
SQISGESHTV

SEQ ID NO: 10904 - protein, 10 aa, Artificial Sequence
  Description of Artificial Sequence: Synthetic peptide
AVFLGFLSAA

SEQ ID NO: 10905 - protein, 10 aa, Artificial Sequence
  Description of Artificial Sequence: Synthetic peptide
SQISGESHAV

SEQ ID NO: 10906 - protein, 9 aa, Artificial Sequence
  Description of Artificial Sequence: Synthetic peptide
GQYPPLASL

SEQ ID NO: 10907 - protein, 9 aa, Artificial Sequence
  Description of Artificial Sequence: Synthetic peptide
AEWDRLHPA

SEQ ID NO: 10908 - protein, 9 aa, Artificial Sequence
  Description of Artificial Sequence: Synthetic peptide
VEIEPLGVA

SEQ ID NO: 10909 - protein, 9 aa, Artificial Sequence
  Description of Artificial Sequence: Synthetic peptide
LETEPIVGA

SEQ ID NO: 10910 - protein, 10 aa, Artificial Sequence
  Description of Artificial Sequence: Synthetic peptide
KIIGQIRDQA

SEQ ID NO: 10911 - protein, 10 aa, Artificial Sequence
  Description of Artificial Sequence: Synthetic peptide
KQYDNILIEI

SEQ ID NO: 10912 - protein, 10 aa, Artificial Sequence
  Description of Artificial Sequence: Synthetic peptide
KIIGQLQPSL

SEQ ID NO: 10913 - protein, 11 aa, Artificial Sequence
  Description of Artificial Sequence: Synthetic peptide
SQISGESHAVL

SEQ ID NO: 10914 - protein, 9 aa, Artificial Sequence
  Description of Artificial Sequence: Synthetic peptide
GTDRIIEVL

SEQ ID NO: 10915 - protein, 9 aa, Artificial Sequence
  Description of Artificial Sequence: Synthetic peptide
IIAQIQPSI

SEQ ID NO: 10916 - protein, 9 aa, Artificial Sequence
  Description of Artificial Sequence: Synthetic peptide
KVVSLTETT

SEQ ID NO: 10917 - protein, 9 aa, Artificial Sequence
  Description of Artificial Sequence: Synthetic peptide
EIIGDIRKA

SEQ ID NO: 10918 - protein, 9 aa, Artificial Sequence
  Description of Artificial Sequence: Synthetic peptide
RTPPAAEGV

SEQ ID NO: 10919 - protein, 11 aa, Artificial Sequence
  Description of Artificial Sequence: Synthetic peptide
RTPPAAEGVGA

SEQ ID NO: 10920 - protein, 10 aa, Artificial Sequence
  Description of Artificial Sequence: Synthetic peptide
GVVESINKEL

SEQ ID NO: 10921 - protein, 9 aa, Artificial Sequence
  Description of Artificial Sequence: Synthetic peptide
TVLSIVNRV

SEQ ID NO: 10922 - protein, 9 aa, Artificial Sequence
  Description of Artificial Sequence: Synthetic peptide
IEIKDTKEA

SEQ ID NO: 10923 - protein, 9 aa, Artificial Sequence
  Description of Artificial Sequence: Synthetic peptide
AVLSIVNRV

SEQ ID NO: 10924 - protein, 9 aa, Artificial Sequence
  Description of Artificial Sequence: Synthetic peptide
VLAEAMSQA

SEQ ID NO: 10925 - protein, 10 aa, Artificial Sequence
  Description of Artificial Sequence: Synthetic peptide
RVLAEAMSQA

SEQ ID NO: 10926 - protein, 9 aa, Artificial Sequence
  Description of Artificial Sequence: Synthetic peptide
IVQQQNNLL

SEQ ID NO: 10927 - protein, 9 aa, Artificial Sequence
  Description of Artificial Sequence: Synthetic peptide
IVNQIIEQL

SEQ ID NO: 10928 - protein, 9 aa, Artificial Sequence
  Description of Artificial Sequence: Synthetic peptide
AIIRILQQL

SEQ ID NO: 10929 - protein, 9 aa, Artificial Sequence
  Description of Artificial Sequence: Synthetic peptide
IEVKDTKEA

SEQ ID NO: 10930 - protein, 9 aa, Artificial Sequence
  Description of Artificial Sequence: Synthetic peptide
ILKEPVHGV

SEQ ID NO: 10931 - protein, 9 aa, Artificial Sequence
  Description of Artificial Sequence: Synthetic peptide
WTVNDIQKL

SEQ ID NO: 10932 - protein, 10 aa, Artificial Sequence
  Description of Artificial Sequence: Synthetic peptide
ATNTAIMMQK

SEQ ID NO: 10933 - protein, 10 aa, Artificial Sequence
  Description of Artificial Sequence: Synthetic peptide
ATNAAIMMQK

SEQ ID NO: 10934 - protein, 9 aa, Artificial Sequence
  Description of Artificial Sequence: Synthetic peptide
QIYPGIKIK

SEQ ID NO: 10935 - protein, 11 aa, Artificial Sequence
  Description of Artificial Sequence: Synthetic peptide
SQANTTIMMQK

SEQ ID NO: 10936 - protein, 11 aa, Artificial Sequence
  Description of Artificial Sequence: Synthetic peptide
SQANSAIMMQK

SEQ ID NO: 10937 - protein, 9 aa, Artificial Sequence
  Description of Artificial Sequence: Synthetic peptide
SNYSNIIYK

SEQ ID NO: 10938 - protein, 9 aa, Artificial Sequence
  Description of Artificial Sequence: Synthetic peptide
ALTALVSPK

SEQ ID NO: 10939 - protein, 10 aa, Artificial Sequence
  Description of Artificial Sequence: Synthetic peptide
GTNFTSATVK

SEQ ID NO: 10940 - protein, 10 aa, Artificial Sequence
  Description of Artificial Sequence: Synthetic peptide
QANSAIMMQK

SEQ ID NO: 10941 - protein, 10 aa, Artificial Sequence
  Description of Artificial Sequence: Synthetic peptide
QANTTIMMQK

SEQ ID NO: 10942 - protein, 9 aa, Artificial Sequence
  Description of Artificial Sequence: Synthetic peptide
KILDPFRAK

SEQ ID NO: 10943 - protein, 11 aa, Artificial Sequence
  Description of Artificial Sequence: Synthetic peptide
KTKPPLPSVQK

SEQ ID NO: 10944 - protein, 10 aa, Artificial Sequence
  Description of Artificial Sequence: Synthetic peptide
GQYPPLASLK

SEQ ID NO: 10945 - protein, 9 aa, Artificial Sequence
  Description of Artificial Sequence: Synthetic peptide
KIIEKLIQK

SEQ ID NO: 10946 - protein, 9 aa, Artificial Sequence
  Description of Artificial Sequence: Synthetic peptide
ILTETTNQK

SEQ ID NO: 10947 - protein, 9 aa, Artificial Sequence
  Description of Artificial Sequence: Synthetic peptide
ANSAIMMQK

SEQ ID NO: 10948 - protein, 10 aa, Artificial Sequence
  Description of Artificial Sequence: Synthetic peptide
GSYFPNATIK

SEQ ID NO: 10949 - protein, 10 aa, Artificial Sequence
  Description of Artificial Sequence: Synthetic peptide
KTKPPLPSVK

SEQ ID NO: 10950 - protein, 9 aa, Artificial Sequence
  Description of Artificial Sequence: Synthetic peptide
ALFNKTIKF

SEQ ID NO: 10951 - protein, 10 aa, Artificial Sequence
  Description of Artificial Sequence: Synthetic peptide
GLYPPLASLK

SEQ ID NO: 10952 - protein, 11 aa, Artificial Sequence
  Description of Artificial Sequence: Synthetic peptide
AVILTETTNQK

SEQ ID NO: 10953 - protein, 10 aa, Artificial Sequence
  Description of Artificial Sequence: Synthetic peptide
VILTETTNQK

SEQ ID NO: 10954 - protein, 9 aa, Artificial Sequence
  Description of Artificial Sequence: Synthetic peptide
AIFQYSMTK

SEQ ID NO: 10955 - protein, 9 aa, Artificial Sequence
  Description of Artificial Sequence: Synthetic peptide
RLYERIRER

SEQ ID NO: 10956 - protein, 9 aa, Artificial Sequence
  Description of Artificial Sequence: Synthetic peptide
STIKQACPK

SEQ ID NO: 10957 - protein, 9 aa, Artificial Sequence
  Description of Artificial Sequence: Synthetic peptide
ATKGLGISY

SEQ ID NO: 10958 - protein, 11 aa, Artificial Sequence
  Description of Artificial Sequence: Synthetic peptide
KTKPPLPSVKK

SEQ ID NO: 10959 - protein, 9 aa, Artificial Sequence
  Description of Artificial Sequence: Synthetic peptide
KILEPFRMK

SEQ ID NO: 10960 - protein, 10 aa, Artificial Sequence
  Description of Artificial Sequence: Synthetic peptide
TLSDQSSTLK

SEQ ID NO: 10961 - protein, 9 aa, Artificial Sequence
  Description of Artificial Sequence: Synthetic peptide
AVLYYVHQK

SEQ ID NO: 10962 - protein, 9 aa, Artificial Sequence
  Description of Artificial Sequence: Synthetic peptide
QIIEQLIQK

SEQ ID NO: 10963 - protein, 9 aa, Artificial Sequence
  Description of Artificial Sequence: Synthetic peptide
KILEPFRAK

SEQ ID NO: 10964 - protein, 9 aa, Artificial Sequence
  Description of Artificial Sequence: Synthetic peptide
ALTALIAPK

SEQ ID NO: 10965 - protein, 9 aa, Artificial Sequence
  Description of Artificial Sequence: Synthetic peptide
QIYPGIKVK

SEQ ID NO: 10966 - protein, 9 aa, Artificial Sequence
  Description of Artificial Sequence: Synthetic peptide
QIYPGIKVR

SEQ ID NO: 10967 - protein, 9 aa, Artificial Sequence
  Description of Artificial Sequence: Synthetic peptide
AIFQSSMTK

SEQ ID NO: 10968 - protein, 10 aa, Artificial Sequence
  Description of Artificial Sequence: Synthetic peptide
TVYYGVPVWK

SEQ ID NO: 10969 - protein, 11 aa, Artificial Sequence
  Description of Artificial Sequence: Synthetic peptide
TVNDIQKLVGK

SEQ ID NO: 10970 - protein, 10 aa, Artificial Sequence
  Description of Artificial Sequence: Synthetic peptide
ATNTAIMMQK

SEQ ID NO: 10971 - protein, 10 aa, Artificial Sequence
  Description of Artificial Sequence: Synthetic peptide
ATNAAIMMQK

SEQ ID NO: 10972 - protein, 11 aa, Artificial Sequence
  Description of Artificial Sequence: Synthetic peptide
SQANTTIMMQK

SEQ ID NO: 10973 - protein, 10 aa, Artificial Sequence
  Description of Artificial Sequence: Synthetic peptide
TVQPIQLPNK

SEQ ID NO: 10974 - protein, 10 aa, Artificial Sequence
  Description of Artificial Sequence: Synthetic peptide
GTNFTSATVK

SEQ ID NO: 10975 - protein, 11 aa, Artificial Sequence
  Description of Artificial Sequence: Synthetic peptide
AVILTETTNQK

SEQ ID NO: 10976 - protein, 10 aa, Artificial Sequence
  Description of Artificial Sequence: Synthetic peptide
QANSAIMMQK

SEQ ID NO: 10977 - protein, 11 aa, Artificial Sequence
  Description of Artificial Sequence: Synthetic peptide
AVSLTETTNQK

SEQ ID NO: 10978 - protein, 11 aa, Artificial Sequence
  Description of Artificial Sequence: Synthetic peptide
TVDDIQKLVGK

SEQ ID NO: 10979 - protein, 10 aa, Artificial Sequence
  Description of Artificial Sequence: Synthetic peptide
QANTTIMMQK

SEQ ID NO: 10980 - protein, 9 aa, Artificial Sequence
  Description of Artificial Sequence: Synthetic peptide
ALTALVSPK

SEQ ID NO: 10981 - protein, 11 aa, Artificial Sequence
  Description of Artificial Sequence: Synthetic peptide
SQANSAIMMQK

SEQ ID NO: 10982 - protein, 11 aa, Artificial Sequence
  Description of Artificial Sequence: Synthetic peptide
ATGDIIGDIKK

SEQ ID NO: 10983 - protein, 9 aa, Artificial Sequence
  Description of Artificial Sequence: Synthetic peptide
ILTETTNQK

SEQ ID NO: 10984 - protein, 10 aa, Artificial Sequence
  Description of Artificial Sequence: Synthetic peptide
VILTETTNQK

SEQ ID NO: 10985 - protein, 9 aa, Artificial Sequence
  Description of Artificial Sequence: Synthetic peptide
QIHQDPVPK

SEQ ID NO: 10986 - protein, 10 aa, Artificial Sequence
  Description of Artificial Sequence: Synthetic peptide
TVQPIQLPDK

SEQ ID NO: 10987 - protein, 9 aa, Artificial Sequence
  Description of Artificial Sequence: Synthetic peptide
ANSAIMMQK

SEQ ID NO: 10988 - protein, 10 aa, Artificial Sequence
  Description of Artificial Sequence: Synthetic peptide
TLSDQSSTLK

SEQ ID NO: 10989 - protein, 10 aa, Artificial Sequence
  Description of Artificial Sequence: Synthetic peptide
ATGDIIGDIK

SEQ ID NO: 10990 - protein, 11 aa, Artificial Sequence
  Description of Artificial Sequence: Synthetic peptide
KTQQAAAAADK

SEQ ID NO: 10991 - protein, 11 aa, Artificial Sequence
  Description of Artificial Sequence: Synthetic peptide
KTKPPLPSVQK

SEQ ID NO: 10992 - protein, 9 aa, Artificial Sequence
  Description of Artificial Sequence: Synthetic peptide
STIKQACPK

SEQ ID NO: 10993 - protein, 10 aa, Artificial Sequence
  Description of Artificial Sequence: Synthetic peptide
GSYFPNATIK

SEQ ID NO: 10994 - protein, 10 aa, Artificial Sequence
  Description of Artificial Sequence: Synthetic peptide
GSQPTTPCTK

SEQ ID NO: 10995 - protein, 9 aa, Artificial Sequence
  Description of Artificial Sequence: Synthetic peptide
LTALIAPEK

SEQ ID NO: 10996 - protein, 9 aa, Artificial Sequence
  Description of Artificial Sequence: Synthetic peptide
QIYPGIKIK

SEQ ID NO: 10997 - protein, 9 aa, Artificial Sequence
  Description of Artificial Sequence: Synthetic peptide
SNYSNIIYK

SEQ ID NO: 10998 - protein, 11 aa, Artificial Sequence
  Description of Artificial Sequence: Synthetic peptide
ATGAIIGDIRK

SEQ ID NO: 10999 - protein, 8 aa, Artificial Sequence
  Description of Artificial Sequence: Synthetic peptide
IVNKIIEK

SEQ ID NO: 11000 - protein, 10 aa, Artificial Sequence
  Description of Artificial Sequence: Synthetic peptide
GLYPPLASLK

SEQ ID NO: 11001 - protein, 9 aa, Artificial Sequence
  Description of Artificial Sequence: Synthetic peptide
AIFQYSMTK

SEQ ID NO: 11002 - protein, 9 aa, Artificial Sequence
  Description of Artificial Sequence: Synthetic peptide
KSESEIVNK

SEQ ID NO: 11003 - protein, 10 aa, Artificial Sequence
  Description of Artificial Sequence: Synthetic peptide
GQYPPLASLK

SEQ ID NO: 11004 - protein, 11 aa, Artificial Sequence
  Description of Artificial Sequence: Synthetic peptide
VVSLTETTNQK

SEQ ID NO: 11005 - protein, 11 aa, Artificial Sequence
  Description of Artificial Sequence: Synthetic peptide
ATGEIIGDIRK

SEQ ID NO: 11006 - protein, 9 aa, Artificial Sequence
  Description of Artificial Sequence: Synthetic peptide
AVLYYVHQK

SEQ ID NO: 11007 - protein, 10 aa, Artificial Sequence
  Description of Artificial Sequence: Synthetic peptide
VVESINKELK

SEQ ID NO: 11008 - protein, 9 aa, Artificial Sequence
  Description of Artificial Sequence: Synthetic peptide
QIIEQLIQK

SEQ ID NO: 11009 - protein, 10 aa, Artificial Sequence
  Description of Artificial Sequence: Synthetic peptide
SLQTGSEELK

SEQ ID NO: 11010 - protein, 10 aa, Artificial Sequence
  Description of Artificial Sequence: Synthetic peptide
GSNFTSSAVK

SEQ ID NO: 11011 - protein, 11 aa, Artificial Sequence
  Description of Artificial Sequence: Synthetic peptide
QSQGVVESINK

SEQ ID NO: 11012 - protein, 10 aa, Artificial Sequence
  Description of Artificial Sequence: Synthetic peptide
TVQPIQLPEK

SEQ ID NO: 11013 - protein, 11 aa, Artificial Sequence
  Description of Artificial Sequence: Synthetic peptide
YVDGASNRETK

SEQ ID NO: 11014 - protein, 9 aa, Artificial Sequence
  Description of Artificial Sequence: Synthetic peptide
ALTALIAPK

SEQ ID NO: 11015 - protein, 9 aa, Artificial Sequence
  Description of Artificial Sequence: Synthetic peptide
QIYPGIKVK

SEQ ID NO: 11016 - protein, 9 aa, Artificial Sequence
  Description of Artificial Sequence: Synthetic peptide
STITQACPK

SEQ ID NO: 11017 - protein, 10 aa, Artificial Sequence
  Description of Artificial Sequence: Synthetic peptide
GSNFTSAAVK

SEQ ID NO: 11018 - protein, 10 aa, Artificial Sequence
  Description of Artificial Sequence: Synthetic peptide
SILDIKQGPK

SEQ ID NO: 11019 - protein, 9 aa, Artificial Sequence
  Description of Artificial Sequence: Synthetic peptide
AVDLSHFLK

SEQ ID NO: 11020 - protein, 9 aa, Artificial Sequence
  Description of Artificial Sequence: Synthetic peptide
KQLTEAVQK

SEQ ID NO: 11021 - protein, 11 aa, Artificial Sequence
  Description of Artificial Sequence: Synthetic peptide
TVNDIQKLVGK

SEQ ID NO: 11022 - protein, 9 aa, Artificial Sequence
  Description of Artificial Sequence: Synthetic peptide
AIFQSSMTK

SEQ ID NO: 11023 - protein, 11 aa, Artificial Sequence
  Description of Artificial Sequence: Synthetic peptide
QSQGVVESMNK

SEQ ID NO: 11024 - protein, 9 aa, Artificial Sequence
  Description of Artificial Sequence: Synthetic peptide
IIATDIQTK

SEQ ID NO: 11025 - protein, 11 aa, Artificial Sequence
  Description of Artificial Sequence: Synthetic peptide
ATDIQTKELQK

SEQ ID NO: 11026 - protein, 10 aa, Artificial Sequence
  Description of Artificial Sequence: Synthetic peptide
VVESMNKELK

SEQ ID NO: 11027 - protein, 10 aa, Artificial Sequence
  Description of Artificial Sequence: Synthetic peptide
ATNTAIMMQK

SEQ ID NO: 11028 - protein, 10 aa, Artificial Sequence
  Description of Artificial Sequence: Synthetic peptide
ATNAAIMMQK

SEQ ID NO: 11029 - protein, 11 aa, Artificial Sequence
  Description of Artificial Sequence: Synthetic peptide
SQANTTIMMQK

SEQ ID NO: 11030 - protein, 11 aa, Artificial Sequence
  Description of Artificial Sequence: Synthetic peptide
SQANSAIMMQK

SEQ ID NO: 11031 - protein, 11 aa, Artificial Sequence
  Description of Artificial Sequence: Synthetic peptide
AVILTETTNQK

SEQ ID NO: 11032 - protein, 11 aa, Artificial Sequence
  Description of Artificial Sequence: Synthetic peptide
ATGDIIGDIKK

SEQ ID NO: 11033 - protein, 10 aa, Artificial Sequence
  Description of Artificial Sequence: Synthetic peptide
GTNFTSATVK

SEQ ID NO: 11034 - protein, 10 aa, Artificial Sequence
  Description of Artificial Sequence: Synthetic peptide
QANSAIMMQK

SEQ ID NO: 11035 - protein, 10 aa, Artificial Sequence
  Description of Artificial Sequence: Synthetic peptide
ATGDIIGDIK

SEQ ID NO: 11036 - protein, 9 aa, Artificial Sequence
  Description of Artificial Sequence: Synthetic peptide
SNYSNIIYK

SEQ ID NO: 11037 - protein, 11 aa, Artificial Sequence
  Description of Artificial Sequence: Synthetic peptide
ATGAIIGDIRK

SEQ ID NO: 11038 - protein, 11 aa, Artificial Sequence
  Description of Artificial Sequence: Synthetic peptide
AVSLTETTNQK

SEQ ID NO: 11039 - protein, 9 aa, Artificial Sequence
  Description of Artificial Sequence: Synthetic peptide
STIKQACPK

SEQ ID NO: 11040 - protein, 10 aa, Artificial Sequence
  Description of Artificial Sequence: Synthetic peptide
TVQPIQLPNK

SEQ ID NO: 11041 - protein, 10 aa, Artificial Sequence
  Description of Artificial Sequence: Synthetic peptide
GSYFPNATIK

SEQ ID NO: 11042 - protein, 10 aa, Artificial Sequence
  Description of Artificial Sequence: Synthetic peptide
STITGLLLTR

SEQ ID NO: 11043 - protein, 10 aa, Artificial Sequence
  Description of Artificial Sequence: Synthetic peptide
QANTTIMMQK

SEQ ID NO: 11044 - protein, 11 aa, Artificial Sequence
  Description of Artificial Sequence: Synthetic peptide
TVDDIQKLVGK

SEQ ID NO: 11045 - protein, 9 aa, Artificial Sequence
  Description of Artificial Sequence: Synthetic peptide
KIIEKLIQK

SEQ ID NO: 11046 - protein, 9 aa, Artificial Sequence
  Description of Artificial Sequence: Synthetic peptide
ANSAIMMQK

SEQ ID NO: 11047 - protein, 9 aa, Artificial Sequence
  Description of Artificial Sequence: Synthetic peptide
QIYPGIKIK

SEQ ID NO: 11048 - protein, 9 aa, Artificial Sequence
  Description of Artificial Sequence: Synthetic peptide
LTALIAPEK

SEQ ID NO: 11049 - protein, 10 aa, Artificial Sequence
  Description of Artificial Sequence: Synthetic peptide
GQYPPLASLK

SEQ ID NO: 11050 - protein, 9 aa, Artificial Sequence
  Description of Artificial Sequence: Synthetic peptide
ALTALVSPK

SEQ ID NO: 11051 - protein, 9 aa, Artificial Sequence
  Description of Artificial Sequence: Synthetic peptide
KTIYMLIEK

SEQ ID NO: 11052 - protein, 9 aa, Artificial Sequence
  Description of Artificial Sequence: Synthetic peptide
ASDAKSYEK

SEQ ID NO: 11053 - protein, 9 aa, Artificial Sequence
  Description of Artificial Sequence: Synthetic peptide
LTALIAPKK

SEQ ID NO: 11054 - protein, 10 aa, Artificial Sequence
  Description of Artificial Sequence: Synthetic peptide
VILTETTNQK

SEQ ID NO: 11055 - protein, 10 aa, Artificial Sequence
  Description of Artificial Sequence: Synthetic peptide
SQIHQDPVPK

SEQ ID NO: 11056 - protein, 9 aa, Artificial Sequence
  Description of Artificial Sequence: Synthetic peptide
ATKGLGISY

SEQ ID NO: 11057 - protein, 11 aa, Artificial Sequence
  Description of Artificial Sequence: Synthetic peptide
TTGEIIGDIRK

SEQ ID NO: 11058 - protein, 9 aa, Artificial Sequence
  Description of Artificial Sequence: Synthetic peptide
AIFQYSMTK

SEQ ID NO: 11059 - protein, 9 aa, Artificial Sequence
  Description of Artificial Sequence: Synthetic peptide
AVLYYVHQR

SEQ ID NO: 11060 - protein, 9 aa, Artificial Sequence
  Description of Artificial Sequence: Synthetic peptide
QIHQDPVPK

SEQ ID NO: 11061 - protein, 9 aa, Artificial Sequence
  Description of Artificial Sequence: Synthetic peptide
QVHQNSLPK

SEQ ID NO: 11062 - protein, 11 aa, Artificial Sequence
  Description of Artificial Sequence: Synthetic peptide
ATGEIIGDIRK

SEQ ID NO: 11063 - protein, 11 aa, Artificial Sequence
  Description of Artificial Sequence: Synthetic peptide
VVSLTETTNQK

SEQ ID NO: 11064 - protein, 9 aa, Artificial Sequence
  Description of Artificial Sequence: Synthetic peptide
AVLYYVHQK

SEQ ID NO: 11065 - protein, 9 aa, Artificial Sequence
  Description of Artificial Sequence: Synthetic peptide
AVLYFVHQK

SEQ ID NO: 11066 - protein, 10 aa, Artificial Sequence
  Description of Artificial Sequence: Synthetic peptide
GAVDLSHFLK

SEQ ID NO: 11067 - protein, 9 aa, Artificial Sequence
  Description of Artificial Sequence: Synthetic peptide
QIIEQLIQK

SEQ ID NO: 11068 - protein, 10 aa, Artificial Sequence
  Description of Artificial Sequence: Synthetic peptide
GSNFTSSAVK

SEQ ID NO: 11069 - protein, 10 aa, Artificial Sequence
  Description of Artificial Sequence: Synthetic peptide
TVQPIQLPEK

SEQ ID NO: 11070 - protein, 11 aa, Artificial Sequence
  Description of Artificial Sequence: Synthetic peptide
YVDGASNRETK

SEQ ID NO: 11071 - protein, 8 aa, Artificial Sequence
  Description of Artificial Sequence: Synthetic peptide
NTTIMMQK

SEQ ID NO: 11072 - protein, 9 aa, Artificial Sequence
  Description of Artificial Sequence: Synthetic peptide
ALTALIAPK

SEQ ID NO: 11073 - protein, 9 aa, Artificial Sequence
  Description of Artificial Sequence: Synthetic peptide
QIYPGIKVK

SEQ ID NO: 11074 - protein, 10 aa, Artificial Sequence
  Description of Artificial Sequence: Synthetic peptide
AAVDLSHFLK

SEQ ID NO: 11075 - protein, 10 aa, Artificial Sequence
  Description of Artificial Sequence: Synthetic peptide
SQIYPGIKVK

SEQ ID NO: 11076 - protein, 9 aa, Artificial Sequence
  Description of Artificial Sequence: Synthetic peptide
STITQACPK

SEQ ID NO: 11077 - protein, 9 aa, Artificial Sequence
  Description of Artificial Sequence: Synthetic peptide
APAGYAILK

SEQ ID NO: 11078 - protein, 8 aa, Artificial Sequence
  Description of Artificial Sequence: Synthetic peptide
PAGYAILK

SEQ ID NO: 11079 - protein, 10 aa, Artificial Sequence
  Description of Artificial Sequence: Synthetic peptide
GSNFTSAAVK

SEQ ID NO: 11080 - protein, 9 aa, Artificial Sequence
  Description of Artificial Sequence: Synthetic peptide
QIIEQLIKK

SEQ ID NO: 11081 - protein, 9 aa, Artificial Sequence
  Description of Artificial Sequence: Synthetic peptide
QIYPGIKVR

SEQ ID NO: 11082 - protein, 10 aa, Artificial Sequence
  Description of Artificial Sequence: Synthetic peptide
SILDIKQGPK

SEQ ID NO: 11083 - protein, 9 aa, Artificial Sequence
  Description of Artificial Sequence: Synthetic peptide
AVDLSHFLK

SEQ ID NO: 11084 - protein, 11 aa, Artificial Sequence
  Description of Artificial Sequence: Synthetic peptide
TVNDIQKLVGK

SEQ ID NO: 11085 - protein, 11 aa, Artificial Sequence
  Description of Artificial Sequence: Synthetic peptide
ATDIQTKELQK

SEQ ID NO: 11086 - protein, 9 aa, Artificial Sequence
  Description of Artificial Sequence: Synthetic peptide
AIFQSSMTK

SEQ ID NO: 11087 - protein, 11 aa, Artificial Sequence
  Description of Artificial Sequence: Synthetic peptide
GVVESMNKELK

SEQ ID NO: 11088 - protein, 9 aa, Artificial Sequence
  Description of Artificial Sequence: Synthetic peptide
NYSNIIYKL

SEQ ID NO: 11089 - protein, 10 aa, Artificial Sequence
  Description of Artificial Sequence: Synthetic peptide
SYFPNATIKF

SEQ ID NO: 11090 - protein, 9 aa, Artificial Sequence
  Description of Artificial Sequence: Synthetic peptide
NYSNTIYRL

SEQ ID NO: 11091 - protein, 9 aa, Artificial Sequence
  Description of Artificial Sequence: Synthetic peptide
KYLGNLTQY

SEQ ID NO: 11092 - protein, 9 aa, Artificial Sequence
  Description of Artificial Sequence: Synthetic peptide
IYQNPFKNL

SEQ ID NO: 11093 - protein, 9 aa, Artificial Sequence
  Description of Artificial Sequence: Synthetic peptide
KYLGNIIQY

SEQ ID NO: 11094 - protein, 10 aa, Artificial Sequence
  Description of Artificial Sequence: Synthetic peptide
KYLGNLTQYW

SEQ ID NO: 11095 - protein, 10 aa, Artificial Sequence
  Description of Artificial Sequence: Synthetic peptide
KYLGNIIQYW

SEQ ID NO: 11096 - protein, 9 aa, Artificial Sequence
  Description of Artificial Sequence: Synthetic peptide
YFPNATIKF

SEQ ID NO: 11097 - protein, 10 aa, Artificial Sequence
  Description of Artificial Sequence: Synthetic peptide
SFISGDINNL

SEQ ID NO: 11098 - protein, 10 aa, Artificial Sequence
  Description of Artificial Sequence: Synthetic peptide
VFLKNVTENF

SEQ ID NO: 11099 - protein, 9 aa, Artificial Sequence
  Description of Artificial Sequence: Synthetic peptide
KYLGNLTRY

SEQ ID NO: 11100 - protein, 9 aa, Artificial Sequence
  Description of Artificial Sequence: Synthetic peptide
FYKLDIVQI

SEQ ID NO: 11101 - protein, 9 aa, Artificial Sequence
  Description of Artificial Sequence: Synthetic peptide
AENLWVTVY

SEQ ID NO: 11102 - protein, 9 aa, Artificial Sequence
  Description of Artificial Sequence: Synthetic peptide
IYQEPFKNL

SEQ ID NO: 11103 - protein, 9 aa, Artificial Sequence
  Description of Artificial Sequence: Synthetic peptide
RYLKDQQLL

SEQ ID NO: 11104 - protein, 9 aa, Artificial Sequence
  Description of Artificial Sequence: Synthetic peptide
NYSNIIYKL

SEQ ID NO: 11105 - protein, 10 aa, Artificial Sequence
  Description of Artificial Sequence: Synthetic peptide
SYFPNATIKF

SEQ ID NO: 11106 - protein, 9 aa, Artificial Sequence
  Description of Artificial Sequence: Synthetic peptide
IYQNPFKNL

SEQ ID NO: 11107 - protein, 9 aa, Artificial Sequence
  Description of Artificial Sequence: Synthetic peptide
NYSNTIYRL

SEQ ID NO: 11108 - protein, 9 aa, Artificial Sequence
  Description of Artificial Sequence: Synthetic peptide
YFPNATIKF

SEQ ID NO: 11109 - protein, 10 aa, Artificial Sequence
  Description of Artificial Sequence: Synthetic peptide
SFISGDINNL

SEQ ID NO: 11110 - protein, 9 aa, Artificial Sequence
  Description of Artificial Sequence: Synthetic peptide
TYQIYQNPF

SEQ ID NO: 11111 - protein, 9 aa, Artificial Sequence
  Description of Artificial Sequence: Synthetic peptide
KYLGNLTQY

SEQ ID NO: 11112 - protein, 9 aa, Artificial Sequence
  Description of Artificial Sequence: Synthetic peptide
FYKLDIVQI

SEQ ID NO: 11113 - protein, 9 aa, Artificial Sequence
  Description of Artificial Sequence: Synthetic peptide
IYNTYGDTW

SEQ ID NO: 11114 - protein, 9 aa, Artificial Sequence
  Description of Artificial Sequence: Synthetic peptide
IYQEPFKNL

SEQ ID NO: 11115 - protein, 9 aa, Artificial Sequence
  Description of Artificial Sequence: Synthetic peptide
RYLKDQQLL

SEQ ID NO: 11116 - protein, 9 aa, Artificial Sequence
  Description of Artificial Sequence: Synthetic peptide
YYDPSKDLI

SEQ ID NO: 11117 - protein, 10 aa, Artificial Sequence
  Description of Artificial Sequence: Synthetic peptide
ETAELVITTY

SEQ ID NO: 11118 - protein, 9 aa, Artificial Sequence
  Description of Artificial Sequence: Synthetic peptide
EVKLVITTY

SEQ ID NO: 11119 - protein, 9 aa, Artificial Sequence
  Description of Artificial Sequence: Synthetic peptide
ATAIAVAEW

SEQ ID NO: 11120 - protein, 9 aa, Artificial Sequence
  Description of Artificial Sequence: Synthetic peptide
ELYPPLASL

SEQ ID NO: 11121 - protein, 11 aa, Artificial Sequence
  Description of Artificial Sequence: Synthetic peptide
ELAALGEMGSF

SEQ ID NO: 11122 - protein, 10 aa, Artificial Sequence
  Description of Artificial Sequence: Synthetic peptide
EQASQDVKGW

SEQ ID NO: 11123 - protein, 10 aa, Artificial Sequence
  Description of Artificial Sequence: Synthetic peptide
EVSNYSKEIY

SEQ ID NO: 11124 - protein, 9 aa, Artificial Sequence
  Description of Artificial Sequence: Synthetic peptide
TTKGLGISY

SEQ ID NO: 11125 - protein, 9 aa, Artificial Sequence
  Description of Artificial Sequence: Synthetic peptide
EAKLVVTTY

SEQ ID NO: 11126 - protein, 10 aa, Artificial Sequence
  Description of Artificial Sequence: Synthetic peptide
EQATQEVKGW

SEQ ID NO: 11127 - protein, 10 aa, Artificial Sequence
  Description of Artificial Sequence: Synthetic peptide
EIQKQGQGQW

SEQ ID NO: 11128 - protein, 9 aa, Artificial Sequence
  Description of Artificial Sequence: Synthetic peptide
EVIPMFSAL

SEQ ID NO: 11129 - protein, 10 aa, Artificial Sequence
  Description of Artificial Sequence: Synthetic peptide
DTINEEAAEW

SEQ ID NO: 11130 - protein, 9 aa, Artificial Sequence
  Description of Artificial Sequence: Synthetic peptide
DIAGTTSTL

SEQ ID NO: 11131 - protein, 9 aa, Artificial Sequence
  Description of Artificial Sequence: Synthetic peptide
NVTENFNMW

SEQ ID NO: 11132 - protein, 10 aa, Artificial Sequence
  Description of Artificial Sequence: Synthetic peptide
EVNIVTDSQY

SEQ ID NO: 11133 - protein, 10 aa, Artificial Sequence
  Description of Artificial Sequence: Synthetic peptide
ETAELVITTY

SEQ ID NO: 11134 - protein, 9 aa, Artificial Sequence
  Description of Artificial Sequence: Synthetic peptide
EVKLVITTY

SEQ ID NO: 11135 - protein, 10 aa, Artificial Sequence
  Description of Artificial Sequence: Synthetic peptide
DIIGDIKKAY

SEQ ID NO: 11136 - protein, 10 aa, Artificial Sequence
  Description of Artificial Sequence: Synthetic peptide
ETFRPGGGNM

SEQ ID NO: 11137 - protein, 10 aa, Artificial Sequence
  Description of Artificial Sequence: Synthetic peptide
ETFRPEGGNM

SEQ ID NO: 11138 - protein, 10 aa, Artificial Sequence
  Description of Artificial Sequence: Synthetic peptide
EVSNYSKEIY

SEQ ID NO: 11139 - protein, 9 aa, Artificial Sequence
  Description of Artificial Sequence: Synthetic peptide
EAKLVVTTY

SEQ ID NO: 11140 - protein, 9 aa, Artificial Sequence
  Description of Artificial Sequence: Synthetic peptide
TTKGLGISY

SEQ ID NO: 11141 - protein, 11 aa, Artificial Sequence
  Description of Artificial Sequence: Synthetic peptide
ELAALGEMGSF

SEQ ID NO: 11142 - protein, 9 aa, Artificial Sequence
  Description of Artificial Sequence: Synthetic peptide
DTKFNDTGF

SEQ ID NO: 11143 - protein, 10 aa, Artificial Sequence
  Description of Artificial Sequence: Synthetic peptide
EINNYSNTIY

SEQ ID NO: 11144 - protein, 9 aa, Artificial Sequence
  Description of Artificial Sequence: Synthetic peptide
ATKGLGISY

SEQ ID NO: 11145 - protein, 9 aa, Artificial Sequence
  Description of Artificial Sequence: Synthetic peptide
DTIAINDTL

SEQ ID NO: 11146 - protein, 9 aa, Artificial Sequence
  Description of Artificial Sequence: Synthetic peptide
EIIGDIRKA

SEQ ID NO: 11147 - protein, 9 aa, Artificial Sequence
  Description of Artificial Sequence: Synthetic peptide
ETPGVRYQY

SEQ ID NO: 11148 - protein, 11 aa, Artificial Sequence
  Description of Artificial Sequence: Synthetic peptide
QTGSEELRSLY

SEQ ID NO: 11149 - protein, 9 aa, Artificial Sequence
  Description of Artificial Sequence: Synthetic peptide
ETKKGKAGY

SEQ ID NO: 11150 - protein, 9 aa, Artificial Sequence
  Description of Artificial Sequence: Synthetic peptide
EVIPMFSAL

SEQ ID NO: 11151 - protein, 10 aa, Artificial Sequence
  Description of Artificial Sequence: Synthetic peptide
ETFRPGGGDM

SEQ ID NO: 11152 - protein, 10 aa, Artificial Sequence
  Description of Artificial Sequence: Synthetic peptide
EVNIVTDSQY

SEQ ID NO: 11153 - protein, 9 aa, Artificial Sequence
  Description of Artificial Sequence: Synthetic peptide
ETPGIRYQY

SEQ ID NO: 11154 - protein, 10 aa, Artificial Sequence
  Description of Artificial Sequence: Synthetic peptide
EVIPAETGQE

SEQ ID NO: 11155 - protein, 9 aa, Artificial Sequence
  Description of Artificial Sequence: Synthetic peptide
EVIPAETGQ

SEQ ID NO: 11156 - protein, 10 aa, Artificial Sequence
  Description of Artificial Sequence: Synthetic peptide
ETAELVITTY

SEQ ID NO: 11157 - protein, 9 aa, Artificial Sequence
  Description of Artificial Sequence: Synthetic peptide
EVKLVITTY

SEQ ID NO: 11158 - protein, 11 aa, Artificial Sequence
  Description of Artificial Sequence: Synthetic peptide
ELAALGEMGSF

SEQ ID NO: 11159 - protein, 10 aa, Artificial Sequence
  Description of Artificial Sequence: Synthetic peptide
ETFRPGGGNM

SEQ ID NO: 11160 - protein, 9 aa, Artificial Sequence
  Description of Artificial Sequence: Synthetic peptide
EAKLVVTTY

SEQ ID NO: 11161 - protein, 10 aa, Artificial Sequence
  Description of Artificial Sequence: Synthetic peptide
DIIGDIKKAY

SEQ ID NO: 11162 - protein, 9 aa, Artificial Sequence
  Description of Artificial Sequence: Synthetic peptide
ELTDAVQKV

SEQ ID NO: 11163 - protein, 9 aa, Artificial Sequence
  Description of Artificial Sequence: Synthetic peptide
FISGDINNL

SEQ ID NO: 11164 - protein, 9 aa, Artificial Sequence
  Description of Artificial Sequence: Synthetic peptide
DTKFNDTGF

SEQ ID NO: 11165 - protein, 10 aa, Artificial Sequence
  Description of Artificial Sequence: Synthetic peptide
ETFRPEGGNM

SEQ ID NO: 11166 - protein, 9 aa, Artificial Sequence
  Description of Artificial Sequence: Synthetic peptide
EVIPMFSAL

SEQ ID NO: 11167 - protein, 9 aa, Artificial Sequence
  Description of Artificial Sequence: Synthetic peptide
DIAGTTSTL

SEQ ID NO: 11168 - protein, 10 aa, Artificial Sequence
  Description of Artificial Sequence: Synthetic peptide
EVNIVTDSQY

SEQ ID NO: 11169 - protein, 10 aa, Artificial Sequence
  Description of Artificial Sequence: Synthetic peptide
DIISTDIQTR

SEQ ID NO: 11170 - protein, 9 aa, Artificial Sequence
  Description of Artificial Sequence: Synthetic peptide
DIIGDIKKA

SEQ ID NO: 11171 - protein, 9 aa, Artificial Sequence
  Description of Artificial Sequence: Synthetic peptide
EVKLVITTY

SEQ ID NO: 11172 - protein, 10 aa, Artificial Sequence
  Description of Artificial Sequence: Synthetic peptide
STITGLLLTR

SEQ ID NO: 11173 - protein, 9 aa, Artificial Sequence
  Description of Artificial Sequence: Synthetic peptide
MVHQPISPR

SEQ ID NO: 11174 - protein, 10 aa, Artificial Sequence
  Description of Artificial Sequence: Synthetic peptide
ETFRPGGGNM

SEQ ID NO: 11175 - protein, 10 aa, Artificial Sequence
  Description of Artificial Sequence: Synthetic peptide
MAVDDCVAGR

SEQ ID NO: 11176 - protein, 10 aa, Artificial Sequence
  Description of Artificial Sequence: Synthetic peptide
DIIGDIKKAY

SEQ ID NO: 11177 - protein, 10 aa, Artificial Sequence
  Description of Artificial Sequence: Synthetic peptide
ETAELVITTY

SEQ ID NO: 11178 - protein, 10 aa, Artificial Sequence
  Description of Artificial Sequence: Synthetic peptide
EVVLENVTER

SEQ ID NO: 11179 - protein, 9 aa, Artificial Sequence
  Description of Artificial Sequence: Synthetic peptide
ELYPPLASL

SEQ ID NO: 11180 - protein, 9 aa, Artificial Sequence
  Description of Artificial Sequence: Synthetic peptide
ESVQINCTR

SEQ ID NO: 11181 - protein, 9 aa, Artificial Sequence
  Description of Artificial Sequence: Synthetic peptide
EIVNKIIEK

SEQ ID NO: 11182 - protein, 10 aa, Artificial Sequence
  Description of Artificial Sequence: Synthetic peptide
FVPKQPISQA

SEQ ID NO: 11183 - protein, 11 aa, Artificial Sequence
  Description of Artificial Sequence: Synthetic peptide
TAAEGVGAVSR

SEQ ID NO: 11184 - protein, 10 aa, Artificial Sequence
  Description of Artificial Sequence: Synthetic peptide
DIIATDIQTR

SEQ ID NO: 11185 - protein, 9 aa, Artificial Sequence
  Description of Artificial Sequence: Synthetic peptide
EIIGDIRKA

SEQ ID NO: 11186 - protein, 11 aa, Artificial Sequence
  Description of Artificial Sequence: Synthetic peptide
ETFYVDGASNR

SEQ ID NO: 11187 - protein, 9 aa, Artificial Sequence
  Description of Artificial Sequence: Synthetic peptide
EVIPMFSAL

SEQ ID NO: 11188 - protein, 9 aa, Artificial Sequence
  Description of Artificial Sequence: Synthetic peptide
MVHQAISPR

SEQ ID NO: 11189 - protein, 9 aa, Artificial Sequence
  Description of Artificial Sequence: Synthetic peptide
DIAGTTSTL

SEQ ID NO: 11190 - protein, 9 aa, Artificial Sequence
  Description of Artificial Sequence: Synthetic peptide
LFNTVAVLY

SEQ ID NO: 11191 - protein, 11 aa, Artificial Sequence
  Description of Artificial Sequence: Synthetic peptide
AAADKGVSQNY

SEQ ID NO: 11192 - protein, 9 aa, Artificial Sequence
  Description of Artificial Sequence: Synthetic peptide
ATKGLGISY

SEQ ID NO: 11193 - protein, 9 aa, Artificial Sequence
  Description of Artificial Sequence: Synthetic peptide
TTKGLGISY

SEQ ID NO: 11194 - protein, 9 aa, Artificial Sequence
  Description of Artificial Sequence: Synthetic peptide
LYNTIAVLY

SEQ ID NO: 11195 - protein, 9 aa, Artificial Sequence
  Description of Artificial Sequence: Synthetic peptide
TVLDVGDAY

SEQ ID NO: 11196 - protein, 9 aa, Artificial Sequence
  Description of Artificial Sequence: Synthetic peptide
LFNTVAVLY

SEQ ID NO: 11197 - protein, 10 aa, Artificial Sequence
  Description of Artificial Sequence: Synthetic peptide
LFNTVAVLYY

SEQ ID NO: 11198 - protein, 9 aa, Artificial Sequence
  Description of Artificial Sequence: Synthetic peptide
HLGPGQAFY

SEQ ID NO: 11199 - protein, 9 aa, Artificial Sequence
  Description of Artificial Sequence: Synthetic peptide
GLFNESEKY

SEQ ID NO: 11200 - protein, 9 aa, Artificial Sequence
  Description of Artificial Sequence: Synthetic peptide
HLGPGQTFY

SEQ ID NO: 11201 - protein, 9 aa, Artificial Sequence
  Description of Artificial Sequence: Synthetic peptide
FNTVAVLYY

SEQ ID NO: 11202 - protein, 10 aa, Artificial Sequence
  Description of Artificial Sequence: Synthetic peptide
VSWDPIPIHY

SEQ ID NO: 11203 - protein, 9 aa, Artificial Sequence
  Description of Artificial Sequence: Synthetic peptide
ATKGLGISY

SEQ ID NO: 11204 - protein, 9 aa, Artificial Sequence
  Description of Artificial Sequence: Synthetic peptide
YNTIAVLYY

SEQ ID NO: 11205 - protein, 9 aa, Artificial Sequence
  Description of Artificial Sequence: Synthetic peptide
LYNTIAVLY

SEQ ID NO: 11206 - protein, 9 aa, Artificial Sequence
  Description of Artificial Sequence: Synthetic peptide
VWTIVYIEY

SEQ ID NO: 11207 - protein, 9 aa, Artificial Sequence
  Description of Artificial Sequence: Synthetic peptide
VWTIVFIEY

SEQ ID NO: 11208 - protein, 9 aa, Artificial Sequence
  Description of Artificial Sequence: Synthetic peptide
GFFPDWQNY

SEQ ID NO: 11209 - protein, 9 aa, Artificial Sequence
  Description of Artificial Sequence: Synthetic peptide
GYFPDWQNY

SEQ ID NO: 11210 - protein, 9 aa, Artificial Sequence
  Description of Artificial Sequence: Synthetic peptide
TVLDVGDAY

SEQ ID NO: 11211 - protein, 9 aa, Artificial Sequence
  Description of Artificial Sequence: Synthetic peptide
TEAVQKISL

SEQ ID NO: 11212 - protein, 9 aa, Artificial Sequence
  Description of Artificial Sequence: Synthetic peptide
KTKPPLPSV

SEQ ID NO: 11213 - protein, 10 aa, Artificial Sequence
  Description of Artificial Sequence: Synthetic peptide
GELYPPLASL

SEQ ID NO: 11214 - protein, 8 aa, Artificial Sequence
  Description of Artificial Sequence: Synthetic peptide
SDFNIPAV

SEQ ID NO: 11215 - protein, 9 aa, Artificial Sequence
  Description of Artificial Sequence: Synthetic peptide
KAKPPLPSV

SEQ ID NO: 11216 - protein, 9 aa, Artificial Sequence
  Description of Artificial Sequence: Synthetic peptide
TEAVQKIAL

SEQ ID NO: 11217 - protein, 9 aa, Artificial Sequence
  Description of Artificial Sequence: Synthetic peptide
ATKGLGISY

SEQ ID NO: 11218 - protein, 9 aa, Artificial Sequence
  Description of Artificial Sequence: Synthetic peptide
TTKGLGISY

SEQ ID NO: 11219 - protein, 9 aa, Artificial Sequence
  Description of Artificial Sequence: Synthetic peptide
KGSPAIFQY

SEQ ID NO: 11220 - protein, 11 aa, Artificial Sequence
  Description of Artificial Sequence: Synthetic peptide
ATAEKGVSQNY

SEQ ID NO: 11221 - protein, 11 aa, Artificial Sequence
  Description of Artificial Sequence: Synthetic peptide
AAADKGVSQNY

SEQ ID NO: 11222 - protein, 11 aa, Artificial Sequence
  Description of Artificial Sequence: Synthetic peptide
QTGSEELKSLY

SEQ ID NO: 11223 - protein, 9 aa, Artificial Sequence
  Description of Artificial Sequence: Synthetic peptide
AIMMQKSNY

SEQ ID NO: 11224 - protein, 9 aa, Artificial Sequence
  Description of Artificial Sequence: Synthetic peptide
IGQYIYNTY

SEQ ID NO: 11225 - protein, 10 aa, Artificial Sequence
  Description of Artificial Sequence: Synthetic peptide
ISNNNSREEY

SEQ ID NO: 11226 - protein, 9 aa, Artificial Sequence
  Description of Artificial Sequence: Synthetic peptide
GLFNESEKY

SEQ ID NO: 11227 - protein, 9 aa, Artificial Sequence
  Description of Artificial Sequence: Synthetic peptide
KYLGNLTQY

SEQ ID NO: 11228 - protein, 11 aa, Artificial Sequence
  Description of Artificial Sequence: Synthetic peptide
STNNETPGVRY

SEQ ID NO: 11229 - protein, 11 aa, Artificial Sequence
  Description of Artificial Sequence: Synthetic peptide
QTGSEELRSLY

SEQ ID NO: 11230 - protein, 11 aa, Artificial Sequence
  Description of Artificial Sequence: Synthetic peptide
SVNNETPGIRY

SEQ ID NO: 11231 - protein, 10 aa, Artificial Sequence
  Description of Artificial Sequence: Synthetic peptide
ILKEPVHGAY

SEQ ID NO: 11232 - protein, 10 aa, Artificial Sequence
  Description of Artificial Sequence: Synthetic peptide
GLADQLIHIY

SEQ ID NO: 11233 - protein, 10 aa, Artificial Sequence
  Description of Artificial Sequence: Synthetic peptide
ILKEPVHGVY

SEQ ID NO: 11234 - protein, 9 aa, Artificial Sequence
  Description of Artificial Sequence: Synthetic peptide
KAQEEHEKY

SEQ ID NO: 11235 - protein, 9 aa, Artificial Sequence
  Description of Artificial Sequence: Synthetic peptide
TVLDVGDAY

SEQ ID NO: 11236 - protein, 9 aa, Artificial Sequence
  Description of Artificial Sequence: Synthetic peptide
ATKGLGISY

SEQ ID NO: 11237 - protein, 9 aa, Artificial Sequence
  Description of Artificial Sequence: Synthetic peptide
KGSPAIFQY

SEQ ID NO: 11238 - protein, 9 aa, Artificial Sequence
  Description of Artificial Sequence: Synthetic peptide
TTKGLGISY

SEQ ID NO: 11239 - protein, 11 aa, Artificial Sequence
  Description of Artificial Sequence: Synthetic peptide
ATAEKGVSQNY

SEQ ID NO: 11240 - protein, 9 aa, Artificial Sequence
  Description of Artificial Sequence: Synthetic peptide
RIGPGQSFY

SEQ ID NO: 11241 - protein, 9 aa, Artificial Sequence
  Description of Artificial Sequence: Synthetic peptide
GLFNESEKY

SEQ ID NO: 11242 - protein, 11 aa, Artificial Sequence
  Description of Artificial Sequence: Synthetic peptide
AAADKGVSQNY

SEQ ID NO: 11243 - protein, 9 aa, Artificial Sequence
  Description of Artificial Sequence: Synthetic peptide
AVRAIKILY

SEQ ID NO: 11244 - protein, 9 aa, Artificial Sequence
  Description of Artificial Sequence: Synthetic peptide
KQGDGQWTY

SEQ ID NO: 11245 - protein, 11 aa, Artificial Sequence
  Description of Artificial Sequence: Synthetic peptide
QTGSEELKSLY

SEQ ID NO: 11246 - protein, 9 aa, Artificial Sequence
  Description of Artificial Sequence: Synthetic peptide
KQGQGQWTY

SEQ ID NO: 11247 - protein, 9 aa, Artificial Sequence
  Description of Artificial Sequence: Synthetic peptide
AVLYYVHQR

SEQ ID NO: 11248 - protein, 11 aa, Artificial Sequence
  Description of Artificial Sequence: Synthetic peptide
ATKGLGISYGR

SEQ ID NO: 11249 - protein, 11 aa, Artificial Sequence
  Description of Artificial Sequence: Synthetic peptide
KGRPGNFIQNR

SEQ ID NO: 11250 - protein, 11 aa, Artificial Sequence
  Description of Artificial Sequence: Synthetic peptide
TTKGLGISYGR

SEQ ID NO: 11251 - protein, 10 aa, Artificial Sequence
  Description of Artificial Sequence: Synthetic peptide
AVRAVLNIPR

SEQ ID NO: 11252 - protein, 10 aa, Artificial Sequence
  Description of Artificial Sequence: Synthetic peptide
AGRAVLNVPR

SEQ ID NO: 11253 - protein, 9 aa, Artificial Sequence
  Description of Artificial Sequence: Synthetic peptide
ATKGLGISY

SEQ ID NO: 11254 - protein, 11 aa, Artificial Sequence
  Description of Artificial Sequence: Synthetic peptide
KTKPPLPSVQK

SEQ ID NO: 11255 - protein, 10 aa, Artificial Sequence
  Description of Artificial Sequence: Synthetic peptide
STITGLLLTR

SEQ ID NO: 11256 - protein, 9 aa, Artificial Sequence
  Description of Artificial Sequence: Synthetic peptide
MVHQPISPR

SEQ ID NO: 11257 - protein, 9 aa, Artificial Sequence
  Description of Artificial Sequence: Synthetic peptide
VGWPAVGER

SEQ ID NO: 11258 - protein, 9 aa, Artificial Sequence
  Description of Artificial Sequence: Synthetic peptide
VVLENVTER

SEQ ID NO: 11259 - protein, 10 aa, Artificial Sequence
  Description of Artificial Sequence: Synthetic peptide
AGRAVLNIPR

SEQ ID NO: 11260 - protein, 11 aa, Artificial Sequence
  Description of Artificial Sequence: Synthetic peptide
KTKTQVQEKLR

SEQ ID NO: 11261 - protein, 11 aa, Artificial Sequence
  Description of Artificial Sequence: Synthetic peptide
VGPTPVNIVGR

SEQ ID NO: 11262 - protein, 9 aa, Artificial Sequence
  Description of Artificial Sequence: Synthetic peptide
MYSAPIAGR

SEQ ID NO: 11263 - protein, 11 aa, Artificial Sequence
  Description of Artificial Sequence: Synthetic peptide
IVFTVLSIVNR

SEQ ID NO: 11264 - protein, 11 aa, Artificial Sequence
  Description of Artificial Sequence: Synthetic peptide
KGRPGNFLQNR

SEQ ID NO: 11265 - protein, 9 aa, Artificial Sequence
  Description of Artificial Sequence: Synthetic peptide
VGWPAVRER

SEQ ID NO: 11266 - protein, 8 aa, Artificial Sequence
  Description of Artificial Sequence: Synthetic peptide
AVLSIVNR

SEQ ID NO: 11267 - protein, 9 aa, Artificial Sequence
  Description of Artificial Sequence: Synthetic peptide
VGWPAIRER

SEQ ID NO: 11268 - protein, 9 aa, Artificial Sequence
  Description of Artificial Sequence: Synthetic peptide
QIYPGIKVR

SEQ ID NO: 11269 - protein, 11 aa, Artificial Sequence
  Description of Artificial Sequence: Synthetic peptide
KGRPGNFLQSR

SEQ ID NO: 11270 - protein, 11 aa, Artificial Sequence
  Description of Artificial Sequence: Synthetic peptide
TVNDIQKLVGK

SEQ ID NO: 11271 - protein, 9 aa, Artificial Sequence
  Description of Artificial Sequence: Synthetic peptide
KGLGISYGR

SEQ ID NO: 11272 - protein, 11 aa, Artificial Sequence
  Description of Artificial Sequence: Synthetic peptide
VGPTPVNIIGR

SEQ ID NO: 11273 - protein, 9 aa, Artificial Sequence
  Description of Artificial Sequence: Synthetic peptide
ATKGLGISY

SEQ ID NO: 11274 - protein, 9 aa, Artificial Sequence
  Description of Artificial Sequence: Synthetic peptide
TTKGLGISY

SEQ ID NO: 11275 - protein, 9 aa, Artificial Sequence
  Description of Artificial Sequence: Synthetic peptide
ATAIAVAEW

SEQ ID NO: 11276 - protein, 11 aa, Artificial Sequence
  Description of Artificial Sequence: Synthetic peptide
DTFYVDGASNR

SEQ ID NO: 11277 - protein, 9 aa, Artificial Sequence
  Description of Artificial Sequence: Synthetic peptide
NNYSNTIYR

SEQ ID NO: 11278 - protein, 9 aa, Artificial Sequence
  Description of Artificial Sequence: Synthetic peptide
MYSAPIAGR

SEQ ID NO: 11279 - protein, 10 aa, Artificial Sequence
  Description of Artificial Sequence: Synthetic peptide
DNSEIKIVPR

SEQ ID NO: 11280 - protein, 11 aa, Artificial Sequence
  Description of Artificial Sequence: Synthetic peptide
EINNYSNTIYR

SEQ ID NO: 11281 - protein, 9 aa, Artificial Sequence
  Description of Artificial Sequence: Synthetic peptide
MVHQPISPR

SEQ ID NO: 11282 - protein, 11 aa, Artificial Sequence
  Description of Artificial Sequence: Synthetic peptide
DIKELTDAVQK

SEQ ID NO: 11283 - protein, 10 aa, Artificial Sequence
  Description of Artificial Sequence: Synthetic peptide
DIISTDIQTR

SEQ ID NO: 11284 - protein, 9 aa, Artificial Sequence
  Description of Artificial Sequence: Synthetic peptide
DTNRTETFR

SEQ ID NO: 11285 - protein, 9 aa, Artificial Sequence
  Description of Artificial Sequence: Synthetic peptide
SYRHHFQSR

SEQ ID NO: 11286 - protein, 9 aa, Artificial Sequence
  Description of Artificial Sequence: Synthetic peptide
VVLENVTER

SEQ ID NO: 11287 - protein, 9 aa, Artificial Sequence
  Description of Artificial Sequence: Synthetic peptide
ESVQINCTR

SEQ ID NO: 11288 - protein, 11 aa, Artificial Sequence
  Description of Artificial Sequence: Synthetic peptide
EVSNYSKEIYR

SEQ ID NO: 11289 - protein, 10 aa, Artificial Sequence
  Description of Artificial Sequence: Synthetic peptide
EARKFPSETR

SEQ ID NO: 11290 - protein, 11 aa, Artificial Sequence
  Description of Artificial Sequence: Synthetic peptide
EARKFSSEQAR

SEQ ID NO: 11291 - protein, 10 aa, Artificial Sequence
  Description of Artificial Sequence: Synthetic peptide
DIIATDIQTR

SEQ ID NO: 11292 - protein, 11 aa, Artificial Sequence
  Description of Artificial Sequence: Synthetic peptide
ENLAFQQGEAR

SEQ ID NO: 11293 - protein, 11 aa, Artificial Sequence
  Description of Artificial Sequence: Synthetic peptide
EPLGVAPTKAR

SEQ ID NO: 11294 - protein, 10 aa, Artificial Sequence
  Description of Artificial Sequence: Synthetic peptide
DNSEIKVVPR

SEQ ID NO: 11295 - protein, 11 aa, Artificial Sequence
  Description of Artificial Sequence: Synthetic peptide
TDMEKEGKISR

SEQ ID NO: 11296 - protein, 11 aa, Artificial Sequence
  Description of Artificial Sequence: Synthetic peptide
ETFYVDGASNR

SEQ ID NO: 11297 - protein, 9 aa, Artificial Sequence
  Description of Artificial Sequence: Synthetic peptide
DAWEKIRLR

SEQ ID NO: 11298 - protein, 9 aa, Artificial Sequence
  Description of Artificial Sequence: Synthetic peptide
QARVLAVER

SEQ ID NO: 11299 - protein, 11 aa, Artificial Sequence
  Description of Artificial Sequence: Synthetic peptide
DVKQLTEAVQK

SEQ ID NO: 11300 - protein, 9 aa, Artificial Sequence
  Description of Artificial Sequence: Synthetic peptide
MVHQAISPR

SEQ ID NO: 11301 - protein, 9 aa, Artificial Sequence
  Description of Artificial Sequence: Synthetic peptide
MVHQPISPR

SEQ ID NO: 11302 - protein, 9 aa, Artificial Sequence
  Description of Artificial Sequence: Synthetic peptide
MYSAPIAGR

SEQ ID NO: 11303 - protein, 9 aa, Artificial Sequence
  Description of Artificial Sequence: Synthetic peptide
ESVQINCTR

SEQ ID NO: 11304 - protein, 11 aa, Artificial Sequence
  Description of Artificial Sequence: Synthetic peptide
EINNYSNTIYR

SEQ ID NO: 11305 - protein, 11 aa, Artificial Sequence
  Description of Artificial Sequence: Synthetic peptide
DTFYVDGASNR

SEQ ID NO: 11306 - protein, 9 aa, Artificial Sequence
  Description of Artificial Sequence: Synthetic peptide
NNYSNTIYR

SEQ ID NO: 11307 - protein, 9 aa, Artificial Sequence
  Description of Artificial Sequence: Synthetic peptide
EYKKLVRQR

SEQ ID NO: 11308 - protein, 11 aa, Artificial Sequence
  Description of Artificial Sequence: Synthetic peptide
EVSNYSKEIYR

SEQ ID NO: 11309 - protein, 9 aa, Artificial Sequence
  Description of Artificial Sequence: Synthetic peptide
MVHQSLSPR

SEQ ID NO: 11310 - protein, 9 aa, Artificial Sequence
  Description of Artificial Sequence: Synthetic peptide
EFDSRLALR

SEQ ID NO: 11311 - protein, 10 aa, Artificial Sequence
  Description of Artificial Sequence: Synthetic peptide
EARKFPSETR

SEQ ID NO: 11312 - protein, 9 aa, Artificial Sequence
  Description of Artificial Sequence: Synthetic peptide
NSEIKIVPR

SEQ ID NO: 11313 - protein, 10 aa, Artificial Sequence
  Description of Artificial Sequence: Synthetic peptide
DNSEIKIVPR

SEQ ID NO: 11314 - protein, 11 aa, Artificial Sequence
  Description of Artificial Sequence: Synthetic peptide
TTKGLGISYGR

SEQ ID NO: 11315 - protein, 10 aa, Artificial Sequence
  Description of Artificial Sequence: Synthetic peptide
DIISTDIQTR

SEQ ID NO: 11316 - protein, 9 aa, Artificial Sequence
  Description of Artificial Sequence: Synthetic peptide
EYKKLLRQR

SEQ ID NO: 11317 - protein, 11 aa, Artificial Sequence
  Description of Artificial Sequence: Synthetic peptide
ELTDAVQKVAR

SEQ ID NO: 11318 - protein, 9 aa, Artificial Sequence
  Description of Artificial Sequence: Synthetic peptide
EIVNKIIEK

SEQ ID NO: 11319 - protein, 10 aa, Artificial Sequence
  Description of Artificial Sequence: Synthetic peptide
ETFRPGGGNM

SEQ ID NO: 11320 - protein, 10 aa, Artificial Sequence
  Description of Artificial Sequence: Synthetic peptide
VPKQPISQAR

SEQ ID NO: 11321 - protein, 9 aa, Artificial Sequence
  Description of Artificial Sequence: Synthetic peptide
VVLENVTER

SEQ ID NO: 11322 - protein, 9 aa, Artificial Sequence
  Description of Artificial Sequence: Synthetic peptide
SYRHHFQSR

SEQ ID NO: 11323 - protein, 9 aa, Artificial Sequence
  Description of Artificial Sequence: Synthetic peptide
SNYSKEIYR

SEQ ID NO: 11324 - protein, 11 aa, Artificial Sequence
  Description of Artificial Sequence: Synthetic peptide
EARKFSSEQAR

SEQ ID NO: 11325 - protein, 9 aa, Artificial Sequence
  Description of Artificial Sequence: Synthetic peptide
EFDSRLAFR

SEQ ID NO: 11326 - protein, 9 aa, Artificial Sequence
  Description of Artificial Sequence: Synthetic peptide
AVLYYVHQR

SEQ ID NO: 11327 - protein, 10 aa, Artificial Sequence
  Description of Artificial Sequence: Synthetic peptide
LPKQPLSQAR

SEQ ID NO: 11328 - protein, 9 aa, Artificial Sequence
  Description of Artificial Sequence: Synthetic peptide
DTNRTETFR

SEQ ID NO: 11329 - protein, 11 aa, Artificial Sequence
  Description of Artificial Sequence: Synthetic peptide
TAAEGVGAVSR

SEQ ID NO: 11330 - protein, 10 aa, Artificial Sequence
  Description of Artificial Sequence: Synthetic peptide
STITGLLLTR

SEQ ID NO: 11331 - protein, 11 aa, Artificial Sequence
  Description of Artificial Sequence: Synthetic peptide
EIKDTKEALEK

SEQ ID NO: 11332 - protein, 11 aa, Artificial Sequence
  Description of Artificial Sequence: Synthetic peptide
EPLGVAPTKAR

SEQ ID NO: 11333 - protein, 10 aa, Artificial Sequence
  Description of Artificial Sequence: Synthetic peptide
DIIATDIQTR

SEQ ID NO: 11334 - protein, 9 aa, Artificial Sequence
  Description of Artificial Sequence: Synthetic peptide
FTVLSIVNR

SEQ ID NO: 11335 - protein, 8 aa, Artificial Sequence
  Description of Artificial Sequence: Synthetic peptide
TVLSIVNR

SEQ ID NO: 11336 - protein, 10 aa, Artificial Sequence
  Description of Artificial Sequence: Synthetic peptide
DNSEIKVVPR

SEQ ID NO: 11337 - protein, 9 aa, Artificial Sequence
  Description of Artificial Sequence: Synthetic peptide
NSEIKVVPR

SEQ ID NO: 11338 - protein, 11 aa, Artificial Sequence
  Description of Artificial Sequence: Synthetic peptide
EVKDTKEALEK

SEQ ID NO: 11339 - protein, 11 aa, Artificial Sequence
  Description of Artificial Sequence: Synthetic peptide
ETFYVDGASNR

SEQ ID NO: 11340 - protein, 9 aa, Artificial Sequence
  Description of Artificial Sequence: Synthetic peptide
FYVDGASNR

SEQ ID NO: 11341 - protein, 9 aa, Artificial Sequence
  Description of Artificial Sequence: Synthetic peptide
QIYPGIKVR

SEQ ID NO: 11342 - protein, 9 aa, Artificial Sequence
  Description of Artificial Sequence: Synthetic peptide
FNLPPIVAK

SEQ ID NO: 11343 - protein, 9 aa, Artificial Sequence
  Description of Artificial Sequence: Synthetic peptide
QARVLAVER

SEQ ID NO: 11344 - protein, 9 aa, Artificial Sequence
  Description of Artificial Sequence: Synthetic peptide
MVHQAISPR

SEQ ID NO: 11345 - protein, 11 aa, Artificial Sequence
  Description of Artificial Sequence: Synthetic peptide
TVNDIQKLVGK

SEQ ID NO: 11346 - protein, 10 aa, Artificial Sequence
  Description of Artificial Sequence: Synthetic peptide
ELKKIIGQVR

SEQ ID NO: 11347 - protein, 11 aa, Artificial Sequence
  Description of Artificial Sequence: Synthetic peptide
DTFYVDGASNR

SEQ ID NO: 11348 - protein, 10 aa, Artificial Sequence
  Description of Artificial Sequence: Synthetic peptide
DIISTDIQTR

SEQ ID NO: 11349 - protein, 11 aa, Artificial Sequence
  Description of Artificial Sequence: Synthetic peptide
TAAEGVGAVSR

SEQ ID NO: 11350 - protein, 9 aa, Artificial Sequence
  Description of Artificial Sequence: Synthetic peptide
ESVQINCTR

SEQ ID NO: 11351 - protein, 11 aa, Artificial Sequence
  Description of Artificial Sequence: Synthetic peptide
ETFRPGGGNMK

SEQ ID NO: 11352 - protein, 10 aa, Artificial Sequence
  Description of Artificial Sequence: Synthetic peptide
DTIAINDTLK

SEQ ID NO: 11353 - protein, 11 aa, Artificial Sequence
  Description of Artificial Sequence: Synthetic peptide
SSSGGDLEITR

SEQ ID NO: 11354 - protein, 9 aa, Artificial Sequence
  Description of Artificial Sequence: Synthetic peptide
EIVNKIIEK

SEQ ID NO: 11355 - protein, 10 aa, Artificial Sequence
  Description of Artificial Sequence: Synthetic peptide
STITGLLLTR

SEQ ID NO: 11356 - protein, 11 aa, Artificial Sequence
  Description of Artificial Sequence: Synthetic peptide
EINNYSNTIYR

SEQ ID NO: 11357 - protein, 11 aa, Artificial Sequence
  Description of Artificial Sequence: Synthetic peptide
EVSNYSKEIYR

SEQ ID NO: 11358 - protein, 10 aa, Artificial Sequence
  Description of Artificial Sequence: Synthetic peptide
EVVLENVTER

SEQ ID NO: 11359 - protein, 10 aa, Artificial Sequence
  Description of Artificial Sequence: Synthetic peptide
MAVDDCVAGR

SEQ ID NO: 11360 - protein, 10 aa, Artificial Sequence
  Description of Artificial Sequence: Synthetic peptide
DNSEIKIVPR

SEQ ID NO: 11361 - protein, 11 aa, Artificial Sequence
  Description of Artificial Sequence: Synthetic peptide
TTGEIIGDIRK

SEQ ID NO: 11362 - protein, 11 aa, Artificial Sequence
  Description of Artificial Sequence: Synthetic peptide
ETFRPGGGDMK

SEQ ID NO: 11363 - protein, 11 aa, Artificial Sequence
  Description of Artificial Sequence: Synthetic peptide
ETFRPEGGNMK

SEQ ID NO: 11364 - protein, 11 aa, Artificial Sequence
  Description of Artificial Sequence: Synthetic peptide
DIEPISNNNSR

SEQ ID NO: 11365 - protein, 9 aa, Artificial Sequence
  Description of Artificial Sequence: Synthetic peptide
NSEIKIVPR

SEQ ID NO: 11366 - protein, 10 aa, Artificial Sequence
  Description of Artificial Sequence: Synthetic peptide
ETAELVITTY

SEQ ID NO: 11367 - protein, 10 aa, Artificial Sequence
  Description of Artificial Sequence: Synthetic peptide
NPISEAGAER

SEQ ID NO: 11368 - protein, 11 aa, Artificial Sequence
  Description of Artificial Sequence: Synthetic peptide
EIEPLGVAPTR

SEQ ID NO: 11369 - protein, 9 aa, Artificial Sequence
  Description of Artificial Sequence: Synthetic peptide
TNAAIMMQK

SEQ ID NO: 11370 - protein, 10 aa, Artificial Sequence
  Description of Artificial Sequence: Synthetic peptide
ATNAAIMMQK

SEQ ID NO: 11371 - protein, 10 aa, Artificial Sequence
  Description of Artificial Sequence: Synthetic peptide
ATNTAIMMQK

SEQ ID NO: 11372 - protein, 10 aa, Artificial Sequence
  Description of Artificial Sequence: Synthetic peptide
QANSAIMMQK

SEQ ID NO: 11373 - protein, 9 aa, Artificial Sequence
  Description of Artificial Sequence: Synthetic peptide
MVHQPISPR

SEQ ID NO: 11374 - protein, 11 aa, Artificial Sequence
  Description of Artificial Sequence: Synthetic peptide
AVILTETTNQK

SEQ ID NO: 11375 - protein, 11 aa, Artificial Sequence
  Description of Artificial Sequence: Synthetic peptide
SQANTTIMMQK

SEQ ID NO: 11376 - protein, 11 aa, Artificial Sequence
  Description of Artificial Sequence: Synthetic peptide
DIKELTDAVQK

SEQ ID NO: 11377 - protein, 10 aa, Artificial Sequence
  Description of Artificial Sequence: Synthetic peptide
AAEGVGAVSR

SEQ ID NO: 11378 - protein, 11 aa, Artificial Sequence
  Description of Artificial Sequence: Synthetic peptide
ATGDIIGDIKK

SEQ ID NO: 11379 - protein, 9 aa, Artificial Sequence
  Description of Artificial Sequence: Synthetic peptide
NNYSNTIYR

SEQ ID NO: 11380 - protein, 11 aa, Artificial Sequence
  Description of Artificial Sequence: Synthetic peptide
VGPTPVNIVGR

SEQ ID NO: 11381 - protein, 11 aa, Artificial Sequence
  Description of Artificial Sequence: Synthetic peptide
EISNYSNIIYK

SEQ ID NO: 11382 - protein, 11 aa, Artificial Sequence
  Description of Artificial Sequence: Synthetic peptide
ELTDAVQKVAR

SEQ ID NO: 11383 - protein, 11 aa, Artificial Sequence
  Description of Artificial Sequence: Synthetic peptide
TVDDIQKLVGK

SEQ ID NO: 11384 - protein, 9 aa, Artificial Sequence
  Description of Artificial Sequence: Synthetic peptide
TITGLLLTR

SEQ ID NO: 11385 - protein, 10 aa, Artificial Sequence
  Description of Artificial Sequence: Synthetic peptide
QANTTIMMQK

SEQ ID NO: 11386 - protein, 10 aa, Artificial Sequence
  Description of Artificial Sequence: Synthetic peptide
ETFRPGGGNM

SEQ ID NO: 11387 - protein, 11 aa, Artificial Sequence
  Description of Artificial Sequence: Synthetic peptide
DTLSDQSSTLK

SEQ ID NO: 11388 - protein, 9 aa, Artificial Sequence
  Description of Artificial Sequence: Synthetic peptide
QVTKIQNFR

SEQ ID NO: 11389 - protein, 9 aa, Artificial Sequence
  Description of Artificial Sequence: Synthetic peptide
MYSAPIAGR

SEQ ID NO: 11390 - protein, 11 aa, Artificial Sequence
  Description of Artificial Sequence: Synthetic peptide
EIEPLGVAPTK

SEQ ID NO: 11391 - protein, 9 aa, Artificial Sequence
  Description of Artificial Sequence: Synthetic peptide
VVLENVTER

SEQ ID NO: 11392 - protein, 10 aa, Artificial Sequence
  Description of Artificial Sequence: Synthetic peptide
SSGGDLEITR

SEQ ID NO: 11393 - protein, 10 aa, Artificial Sequence
  Description of Artificial Sequence: Synthetic peptide
DIIATDIQTR

SEQ ID NO: 11394 - protein, 9 aa, Artificial Sequence
  Description of Artificial Sequence: Synthetic peptide
IIATDIQTR

SEQ ID NO: 11395 - protein, 10 aa, Artificial Sequence
  Description of Artificial Sequence: Synthetic peptide
TTGEIIGDIR

SEQ ID NO: 11396 - protein, 9 aa, Artificial Sequence
  Description of Artificial Sequence: Synthetic peptide
FTVLSIVNR

SEQ ID NO: 11397 - protein, 10 aa, Artificial Sequence
  Description of Artificial Sequence: Synthetic peptide
DNSEIKVVPR

SEQ ID NO: 11398 - protein, 9 aa, Artificial Sequence
  Description of Artificial Sequence: Synthetic peptide
NSEIKVVPR

SEQ ID NO: 11399 - protein, 9 aa, Artificial Sequence
  Description of Artificial Sequence: Synthetic peptide
FAVLSIVNR

SEQ ID NO: 11400 - protein, 11 aa, Artificial Sequence
  Description of Artificial Sequence: Synthetic peptide
ETFYVDGASNR

SEQ ID NO: 11401 - protein, 10 aa, Artificial Sequence
  Description of Artificial Sequence: Synthetic peptide
ASITLTVQAR

SEQ ID NO: 11402 - protein, 10 aa, Artificial Sequence
  Description of Artificial Sequence: Synthetic peptide
ATGEIIGDIR

SEQ ID NO: 11403 - protein, 9 aa, Artificial Sequence
  Description of Artificial Sequence: Synthetic peptide
EPLGVAPTR

SEQ ID NO: 11404 - protein, 9 aa, Artificial Sequence
  Description of Artificial Sequence: Synthetic peptide
NITGLLLTR

SEQ ID NO: 11405 - protein, 11 aa, Artificial Sequence
  Description of Artificial Sequence: Synthetic peptide
DVKQLTEAVQK

SEQ ID NO: 11406 - protein, 9 aa, Artificial Sequence
  Description of Artificial Sequence: Synthetic peptide
MVHQAISPR

SEQ ID NO: 11407 - protein, 11 aa, Artificial Sequence
  Description of Artificial Sequence: Synthetic peptide
TVNDIQKLVGK

SEQ ID NO: 11408 - protein, 10 aa, Artificial Sequence
  Description of Artificial Sequence: Synthetic peptide
EVNIVTDSQY

SEQ ID NO: 11409 - protein, 10 aa, Artificial Sequence
  Description of Artificial Sequence: Synthetic peptide
DIIATDIQTK

SEQ ID NO: 11410 - protein, 11 aa, Artificial Sequence
  Description of Artificial Sequence: Synthetic peptide
VGPTPVNIIGR

SEQ ID NO: 11411 - protein, 9 aa, Artificial Sequence
  Description of Artificial Sequence: Synthetic peptide
NTVAVLYYV

SEQ ID NO: 11412 - protein, 9 aa, Artificial Sequence
  Description of Artificial Sequence: Synthetic peptide
ELTDAVQKV

SEQ ID NO: 11413 - protein, 9 aa, Artificial Sequence
  Description of Artificial Sequence: Synthetic peptide
DTIAINDTL

SEQ ID NO: 11414 - protein, 9 aa, Artificial Sequence
  Description of Artificial Sequence: Synthetic peptide
NTVAVLYCV

SEQ ID NO: 11415 - protein, 9 aa, Artificial Sequence
  Description of Artificial Sequence: Synthetic peptide
YTSPIAGNI

SEQ ID NO: 11416 - protein, 9 aa, Artificial Sequence
  Description of Artificial Sequence: Synthetic peptide
YAAPIAGNI

SEQ ID NO: 11417 - protein, 9 aa, Artificial Sequence
  Description of Artificial Sequence: Synthetic peptide
DASTITQAC

SEQ ID NO: 11418 - protein, 9 aa, Artificial Sequence
  Description of Artificial Sequence: Synthetic peptide
ESFGFKEEI

SEQ ID NO: 11419 - protein, 9 aa, Artificial Sequence
  Description of Artificial Sequence: Synthetic peptide
ESFGFREEI

SEQ ID NO: 11420 - protein, 9 aa, Artificial Sequence
  Description of Artificial Sequence: Synthetic peptide
FISGDINNL

SEQ ID NO: 11421 - protein, 9 aa, Artificial Sequence
  Description of Artificial Sequence: Synthetic peptide
YSAPIAGRI

SEQ ID NO: 11422 - protein, 9 aa, Artificial Sequence
  Description of Artificial Sequence: Synthetic peptide
EVSNYSKEI

SEQ ID NO: 11423 - protein, 10 aa, Artificial Sequence
  Description of Artificial Sequence: Synthetic peptide
ETFRPGGGNM

SEQ ID NO: 11424 - protein, 10 aa, Artificial Sequence
  Description of Artificial Sequence: Synthetic peptide
KVVEIEPLGV

SEQ ID NO: 11425 - protein, 9 aa, Artificial Sequence
  Description of Artificial Sequence: Synthetic peptide
EVHIPLEEV

SEQ ID NO: 11426 - protein, 9 aa, Artificial Sequence
  Description of Artificial Sequence: Synthetic peptide
MTSNPPVPV

SEQ ID NO: 11427 - protein, 9 aa, Artificial Sequence
  Description of Artificial Sequence: Synthetic peptide
ETLKYLWNL

SEQ ID NO: 11428 - protein, 9 aa, Artificial Sequence
  Description of Artificial Sequence: Synthetic peptide
YTAFTIPSL

SEQ ID NO: 11429 - protein, 11 aa, Artificial Sequence
  Description of Artificial Sequence: Synthetic peptide
YTSPIAGNITC

SEQ ID NO: 11430 - protein, 9 aa, Artificial Sequence
  Description of Artificial Sequence: Synthetic peptide
ELYPPLASL

SEQ ID NO: 11431 - protein, 9 aa, Artificial Sequence
  Description of Artificial Sequence: Synthetic peptide
IVAFIIALI

SEQ ID NO: 11432 - protein, 11 aa, Artificial Sequence
  Description of Artificial Sequence: Synthetic peptide
EVSNYSKEIYR

SEQ ID NO: 11433 - protein, 9 aa, Artificial Sequence
  Description of Artificial Sequence: Synthetic peptide
WTVDDIQKL

SEQ ID NO: 11434 - protein, 9 aa, Artificial Sequence
  Description of Artificial Sequence: Synthetic peptide
ETAELVITT

SEQ ID NO: 11435 - protein, 9 aa, Artificial Sequence
  Description of Artificial Sequence: Synthetic peptide
YVLSIVAFI

SEQ ID NO: 11436 - protein, 10 aa, Artificial Sequence
  Description of Artificial Sequence: Synthetic peptide
EVGPFIPGDI

SEQ ID NO: 11437 - protein, 11 aa, Artificial Sequence
  Description of Artificial Sequence: Synthetic peptide
EVNIVTDSQYV

SEQ ID NO: 11438 - protein, 9 aa, Artificial Sequence
  Description of Artificial Sequence: Synthetic peptide
NTIAVLYYV

SEQ ID NO: 11439 - protein, 9 aa, Artificial Sequence
  Description of Artificial Sequence: Synthetic peptide
DTAYFILKL

SEQ ID NO: 11440 - protein, 9 aa, Artificial Sequence
  Description of Artificial Sequence: Synthetic peptide
NTIAVLYFV

SEQ ID NO: 11441 - protein, 9 aa, Artificial Sequence
  Description of Artificial Sequence: Synthetic peptide
AVAEWTDRV

SEQ ID NO: 11442 - protein, 9 aa, Artificial Sequence
  Description of Artificial Sequence: Synthetic peptide
TVLSIVNRV

SEQ ID NO: 11443 - protein, 9 aa, Artificial Sequence
  Description of Artificial Sequence: Synthetic peptide
YTAFTIPSV

SEQ ID NO: 11444 - protein, 9 aa, Artificial Sequence
  Description of Artificial Sequence: Synthetic peptide
TTGEIIGDI

SEQ ID NO: 11445 - protein, 9 aa, Artificial Sequence
  Description of Artificial Sequence: Synthetic peptide
ETTNQKAEL

SEQ ID NO: 11446 - protein, 9 aa, Artificial Sequence
  Description of Artificial Sequence: Synthetic peptide
MTGNPPVPV

SEQ ID NO: 11447 - protein, 9 aa, Artificial Sequence
  Description of Artificial Sequence: Synthetic peptide
AAVDLSHFL

SEQ ID NO: 11448 - protein, 9 aa, Artificial Sequence
  Description of Artificial Sequence: Synthetic peptide
AVLSIVNRV

SEQ ID NO: 11449 - protein, 11 aa, Artificial Sequence
  Description of Artificial Sequence: Synthetic peptide
ETFYVDGASNR

SEQ ID NO: 11450 - protein, 10 aa, Artificial Sequence
  Description of Artificial Sequence: Synthetic peptide
EIVNQIIEQL

SEQ ID NO: 11451 - protein, 9 aa, Artificial Sequence
  Description of Artificial Sequence: Synthetic peptide
IVNQIIEQL

SEQ ID NO: 11452 - protein, 9 aa, Artificial Sequence
  Description of Artificial Sequence: Synthetic peptide
NTSTITQAC

SEQ ID NO: 11453 - protein, 9 aa, Artificial Sequence
  Description of Artificial Sequence: Synthetic peptide
GAASITLTV

SEQ ID NO: 11454 - protein, 9 aa, Artificial Sequence
  Description of Artificial Sequence: Synthetic peptide
ETAYFILKL

SEQ ID NO: 11455 - protein, 9 aa, Artificial Sequence
  Description of Artificial Sequence: Synthetic peptide
LVNQIIEQL

SEQ ID NO: 11456 - protein, 9 aa, Artificial Sequence
  Description of Artificial Sequence: Synthetic peptide
QNYPIVQNL

SEQ ID NO: 11457 - protein, 9 aa, Artificial Sequence
  Description of Artificial Sequence: Synthetic peptide
EVIPMFSAL

SEQ ID NO: 11458 - protein, 9 aa, Artificial Sequence
  Description of Artificial Sequence: Synthetic peptide
TTSTLQEQI

SEQ ID NO: 11459 - protein, 9 aa, Artificial Sequence
  Description of Artificial Sequence: Synthetic peptide
DVKQLTEAV

SEQ ID NO: 11460 - protein, 9 aa, Artificial Sequence
  Description of Artificial Sequence: Synthetic peptide
ETAYFLLKL

SEQ ID NO: 11461 - protein, 9 aa, Artificial Sequence
  Description of Artificial Sequence: Synthetic peptide
TVNDIQKLV

SEQ ID NO: 11462 - protein, 9 aa, Artificial Sequence
  Description of Artificial Sequence: Synthetic peptide
SPASRELQV

SEQ ID NO: 11463 - protein, 9 aa, Artificial Sequence
  Description of Artificial Sequence: Synthetic peptide
VPNNGTITL

SEQ ID NO: 11464 - protein, 10 aa, Artificial Sequence
  Description of Artificial Sequence: Synthetic peptide
RPRTPQSSQI

SEQ ID NO: 11465 - protein, 9 aa, Artificial Sequence
  Description of Artificial Sequence: Synthetic peptide
APIAGRINC

SEQ ID NO: 11466 - protein, 9 aa, Artificial Sequence
  Description of Artificial Sequence: Synthetic peptide
HPAHAGPIL

SEQ ID NO: 11467 - protein, 9 aa, Artificial Sequence
  Description of Artificial Sequence: Synthetic peptide
VPKQPISQA

SEQ ID NO: 11468 - protein, 9 aa, Artificial Sequence
  Description of Artificial Sequence: Synthetic peptide
APIAGNITC

SEQ ID NO: 11469 - protein, 9 aa, Artificial Sequence
  Description of Artificial Sequence: Synthetic peptide
SPASGELRV

SEQ ID NO: 11470 - protein, 9 aa, Artificial Sequence
  Description of Artificial Sequence: Synthetic peptide
AVSPASREL

SEQ ID NO: 11471 - protein, 9 aa, Artificial Sequence
  Description of Artificial Sequence: Synthetic peptide
SPIAGNITC

SEQ ID NO: 11472 - protein, 9 aa, Artificial Sequence
  Description of Artificial Sequence: Synthetic peptide
APEKTKPPL

SEQ ID NO: 11473 - protein, 8 aa, Artificial Sequence
  Description of Artificial Sequence: Synthetic peptide
TIRVGGQL

SEQ ID NO: 11474 - protein, 10 aa, Artificial Sequence
  Description of Artificial Sequence: Synthetic peptide
SIRIGPGQSF

SEQ ID NO: 11475 - protein, 9 aa, Artificial Sequence
  Description of Artificial Sequence: Synthetic peptide
SPTSRELRV

SEQ ID NO: 11476 - protein, 9 aa, Artificial Sequence
  Description of Artificial Sequence: Synthetic peptide
SPAIFQCSM

SEQ ID NO: 11477 - protein, 9 aa, Artificial Sequence
  Description of Artificial Sequence: Synthetic peptide
TEAVQKIAL

SEQ ID NO: 11478 - protein, 10 aa, Artificial Sequence
  Description of Artificial Sequence: Synthetic peptide
RPNNNTRKSI

SEQ ID NO: 11479 - protein, 8 aa, Artificial Sequence
  Description of Artificial Sequence: Synthetic peptide
RPVVSTQL

SEQ ID NO: 11480 - protein, 9 aa, Artificial Sequence
  Description of Artificial Sequence: Synthetic peptide
GPSHKARVL

SEQ ID NO: 11481 - protein, 10 aa, Artificial Sequence
  Description of Artificial Sequence: Synthetic peptide
RPAEPVPLQL

SEQ ID NO: 11482 - protein, 8 aa, Artificial Sequence
  Description of Artificial Sequence: Synthetic peptide
KPVVSTQL

SEQ ID NO: 11483 - protein, 9 aa, Artificial Sequence
  Description of Artificial Sequence: Synthetic peptide
TPQDLNTML

SEQ ID NO: 11484 - protein, 9 aa, Artificial Sequence
  Description of Artificial Sequence: Synthetic peptide
SPAIFQSSM

SEQ ID NO: 11485 - protein, 10 aa, Artificial Sequence
  Description of Artificial Sequence: Synthetic peptide
SPIETVPVKL

SEQ ID NO: 11486 - protein, 8 aa, Artificial Sequence
  Description of Artificial Sequence: Synthetic peptide
EAVQKISL

SEQ ID NO: 11487 - protein, 9 aa, Artificial Sequence
  Description of Artificial Sequence: Synthetic peptide
KGKQKVVSL

SEQ ID NO: 11488 - protein, 8 aa, Artificial Sequence
  Description of Artificial Sequence: Synthetic peptide
YVHQKVEV

SEQ ID NO: 11489 - protein, 9 aa, Artificial Sequence
  Description of Artificial Sequence: Synthetic peptide
DKQLKVHAL

SEQ ID NO: 11490 - protein, 8 aa, Artificial Sequence
  Description of Artificial Sequence: Synthetic peptide
DPVPKQPL

SEQ ID NO: 11491 - protein, 8 aa, Artificial Sequence
  Description of Artificial Sequence: Synthetic peptide
GQMVHQSL

SEQ ID NO: 11492 - protein, 9 aa, Artificial Sequence
  Description of Artificial Sequence: Synthetic peptide
YPGIKVKQL

SEQ ID NO: 11493 - protein, 9 aa, Artificial Sequence
  Description of Artificial Sequence: Synthetic peptide
ELKNSAISL

SEQ ID NO: 11494 - protein, 8 aa, Artificial Sequence
  Description of Artificial Sequence: Synthetic peptide
EAVQKIAL

SEQ ID NO: 11495 - protein, 9 aa, Artificial Sequence
  Description of Artificial Sequence: Synthetic peptide
ELKSLFNTV

SEQ ID NO: 11496 - protein, 9 aa, Artificial Sequence
  Description of Artificial Sequence: Synthetic peptide
DVKQLTEAV

SEQ ID NO: 11497 - protein, 8 aa, Artificial Sequence
  Description of Artificial Sequence: Synthetic peptide
HLKTAVQM

SEQ ID NO: 11498 - protein, 11 aa, Artificial Sequence
  Description of Artificial Sequence: Synthetic peptide
GQSNNSDSETF

SEQ ID NO: 11499 - protein, 9 aa, Artificial Sequence
  Description of Artificial Sequence: Synthetic peptide
IQDNSEIKI

SEQ ID NO: 11500 - protein, 9 aa, Artificial Sequence
  Description of Artificial Sequence: Synthetic peptide
GLNSTNETF

SEQ ID NO: 11501 - protein, 10 aa, Artificial Sequence
  Description of Artificial Sequence: Synthetic peptide
GQIRDQAEHL

SEQ ID NO: 11502 - protein, 9 aa, Artificial Sequence
  Description of Artificial Sequence: Synthetic peptide
AQEEDEVGF

SEQ ID NO: 11503 - protein, 9 aa, Artificial Sequence
  Description of Artificial Sequence: Synthetic peptide
KQMAVDDCV

SEQ ID NO: 11504 - protein, 10 aa, Artificial Sequence
  Description of Artificial Sequence: Synthetic peptide
SQISGESHTV

SEQ ID NO: 11505 - protein, 9 aa, Artificial Sequence
  Description of Artificial Sequence: Synthetic peptide
RQGAERALL

SEQ ID NO: 11506 - protein, 10 aa, Artificial Sequence
  Description of Artificial Sequence: Synthetic peptide
HQDPVPKQPL

SEQ ID NO: 11507 - protein, 9 aa, Artificial Sequence
  Description of Artificial Sequence: Synthetic peptide
IQLPDKDSW

SEQ ID NO: 11508 - protein, 9 aa, Artificial Sequence
  Description of Artificial Sequence: Synthetic peptide
GQYPPLASL

SEQ ID NO: 11509 - protein, 9 aa, Artificial Sequence
  Description of Artificial Sequence: Synthetic peptide
SQIYPGIKI

SEQ ID NO: 11510 - protein, 9 aa, Artificial Sequence
  Description of Artificial Sequence: Synthetic peptide
GVTDTKEAL

SEQ ID NO: 11511 - protein, 11 aa, Artificial Sequence
  Description of Artificial Sequence: Synthetic peptide
TQIDPDLADQL

SEQ ID NO: 11512 - protein, 9 aa, Artificial Sequence
  Description of Artificial Sequence: Synthetic peptide
AQEDEEVGF

SEQ ID NO: 11513 - protein, 11 aa, Artificial Sequence
  Description of Artificial Sequence: Synthetic peptide
TQIDPGLADQL

SEQ ID NO: 11514 - protein, 9 aa, Artificial Sequence
  Description of Artificial Sequence: Synthetic peptide
AQEEEEVGF

SEQ ID NO: 11515 - protein, 10 aa, Artificial Sequence
  Description of Artificial Sequence: Synthetic peptide
KQLTEAVQKI

SEQ ID NO: 11516 - protein, 10 aa, Artificial Sequence
  Description of Artificial Sequence: Synthetic peptide
GQVRDQAEHL

SEQ ID NO: 11517 - protein, 9 aa, Artificial Sequence
  Description of Artificial Sequence: Synthetic peptide
SQIYPGIKI

SEQ ID NO: 11518 - protein, 9 aa, Artificial Sequence
  Description of Artificial Sequence: Synthetic peptide
IIAQIQPSI

SEQ ID NO: 11519 - protein, 9 aa, Artificial Sequence
  Description of Artificial Sequence: Synthetic peptide
GQYPPLASL

SEQ ID NO: 11520 - protein, 9 aa, Artificial Sequence
  Description of Artificial Sequence: Synthetic peptide
QQNNLLQAI

SEQ ID NO: 11521 - protein, 9 aa, Artificial Sequence
  Description of Artificial Sequence: Synthetic peptide
SQANTTIMM

SEQ ID NO: 11522 - protein, 9 aa, Artificial Sequence
  Description of Artificial Sequence: Synthetic peptide
YQLETEPII

SEQ ID NO: 11523 - protein, 9 aa, Artificial Sequence
  Description of Artificial Sequence: Synthetic peptide
ALGEVGPFI

SEQ ID NO: 11524 - protein, 8 aa, Artificial Sequence
  Description of Artificial Sequence: Synthetic peptide
GQMVHQSL

SEQ ID NO: 11525 - protein, 9 aa, Artificial Sequence
  Description of Artificial Sequence: Synthetic peptide
VQKISLESI

SEQ ID NO: 11526 - protein, 9 aa, Artificial Sequence
  Description of Artificial Sequence: Synthetic peptide
KQMAVDDCV

SEQ ID NO: 11527 - protein, 10 aa, Artificial Sequence
  Description of Artificial Sequence: Synthetic peptide
KQYDSILIEI

SEQ ID NO: 11528 - protein, 10 aa, Artificial Sequence
  Description of Artificial Sequence: Synthetic peptide
SQISGESHTV

SEQ ID NO: 11529 - protein, 9 aa, Artificial Sequence
  Description of Artificial Sequence: Synthetic peptide
YQLETEPIV

SEQ ID NO: 11530 - protein, 10 aa, Artificial Sequence
  Description of Artificial Sequence: Synthetic peptide
KVVEIEPLGV

SEQ ID NO: 11531 - protein, 10 aa, Artificial Sequence
  Description of Artificial Sequence: Synthetic peptide
KQYDNILIEI

SEQ ID NO: 11532 - protein, 9 aa, Artificial Sequence
  Description of Artificial Sequence: Synthetic peptide
AMSQANTTI

SEQ ID NO: 11533 - protein, 9 aa, Artificial Sequence
  Description of Artificial Sequence: Synthetic peptide
SQANSAIMM

SEQ ID NO: 11534 - protein, 9 aa, Artificial Sequence
  Description of Artificial Sequence: Synthetic peptide
ELTDAVQKV

SEQ ID NO: 11535 - protein, 10 aa, Artificial Sequence
  Description of Artificial Sequence: Synthetic peptide
KQYDHILIEI

SEQ ID NO: 11536 - protein, 10 aa, Artificial Sequence
  Description of Artificial Sequence: Synthetic peptide
ALTDMVPLTA

SEQ ID NO: 11537 - protein, 8 aa, Artificial Sequence
  Description of Artificial Sequence: Synthetic peptide
SQATNTAI

SEQ ID NO: 11538 - protein, 8 aa, Artificial Sequence
  Description of Artificial Sequence: Synthetic peptide
GQDTAYFI

SEQ ID NO: 11539 - protein, 9 aa, Artificial Sequence
  Description of Artificial Sequence: Synthetic peptide
GQGQWTYQI

SEQ ID NO: 11540 - protein, 9 aa, Artificial Sequence
  Description of Artificial Sequence: Synthetic peptide
GQLQPSLQT

SEQ ID NO: 11541 - protein, 9 aa, Artificial Sequence
  Description of Artificial Sequence: Synthetic peptide
TVLSIVNRV

SEQ ID NO: 11542 - protein, 8 aa, Artificial Sequence
  Description of Artificial Sequence: Synthetic peptide
SQGVVESI

SEQ ID NO: 11543 - protein, 9 aa, Artificial Sequence
  Description of Artificial Sequence: Synthetic peptide
QQHMLQLTV

SEQ ID NO: 11544 - protein, 9 aa, Artificial Sequence
  Description of Artificial Sequence: Synthetic peptide
VQKIALESI

SEQ ID NO: 11545 - protein, 8 aa, Artificial Sequence
  Description of Artificial Sequence: Synthetic peptide
GQMVHQPI

SEQ ID NO: 11546 - protein, 9 aa, Artificial Sequence
  Description of Artificial Sequence: Synthetic peptide
NQKAELQAI

SEQ ID NO: 11547 - protein, 9 aa, Artificial Sequence
  Description of Artificial Sequence: Synthetic peptide
AVLSIVNRV

SEQ ID NO: 11548 - protein, 9 aa, Artificial Sequence
  Description of Artificial Sequence: Synthetic peptide
GAASLTLTV

SEQ ID NO: 11549 - protein, 9 aa, Artificial Sequence
  Description of Artificial Sequence: Synthetic peptide
GAASITLTV

SEQ ID NO: 11550 - protein, 8 aa, Artificial Sequence
  Description of Artificial Sequence: Synthetic peptide
GQETAYFI

SEQ ID NO: 11551 - protein, 9 aa, Artificial Sequence
  Description of Artificial Sequence: Synthetic peptide
QQHLLQLTV

SEQ ID NO: 11552 - protein, 8 aa, Artificial Sequence
  Description of Artificial Sequence: Synthetic peptide
NQIIEQLI

SEQ ID NO: 11553 - protein, 9 aa, Artificial Sequence
  Description of Artificial Sequence: Synthetic peptide
SQIYPGIKV

SEQ ID NO: 11554 - protein, 9 aa, Artificial Sequence
  Description of Artificial Sequence: Synthetic peptide
QLTEAVQKI

SEQ ID NO: 11555 - protein, 8 aa, Artificial Sequence
  Description of Artificial Sequence: Synthetic peptide
GQMVHQAI

SEQ ID NO: 11556 - protein, 10 aa, Artificial Sequence
  Description of Artificial Sequence: Synthetic peptide
KQLTEAVQKI

SEQ ID NO: 11557 - protein, 9 aa, Artificial Sequence
  Description of Artificial Sequence: Synthetic peptide
GQVDCSPGI

SEQ ID NO: 11558 - protein, 8 aa, Artificial Sequence
  Description of Artificial Sequence: Synthetic peptide
DRILSSCL

SEQ ID NO: 11559 - protein, 8 aa, Artificial Sequence
  Description of Artificial Sequence: Synthetic peptide
HRAIGTVL

SEQ ID NO: 11560 - protein, 8 aa, Artificial Sequence
  Description of Artificial Sequence: Synthetic peptide
DRLVSAGI

SEQ ID NO: 11561 - protein, 8 aa, Artificial Sequence
  Description of Artificial Sequence: Synthetic peptide
ERILSSCL

SEQ ID NO: 11562 - protein, 9 aa, Artificial Sequence
  Description of Artificial Sequence: Synthetic peptide
ERYLKDQQL

SEQ ID NO: 11563 - protein, 8 aa, Artificial Sequence
  Description of Artificial Sequence: Synthetic peptide
GQMVHQSL

SEQ ID NO: 11564 - protein, 8 aa, Artificial Sequence
  Description of Artificial Sequence: Synthetic peptide
DRILSSCL

SEQ ID NO: 11565 - protein, 8 aa, Artificial Sequence
  Description of Artificial Sequence: Synthetic peptide
HRAIGTVL

SEQ ID NO: 11566 - protein, 8 aa, Artificial Sequence
  Description of Artificial Sequence: Synthetic peptide
QRAVRAVL

SEQ ID NO: 11567 - protein, 9 aa, Artificial Sequence
  Description of Artificial Sequence: Synthetic peptide
TEAVQKISL

SEQ ID NO: 11568 - protein, 9 aa, Artificial Sequence
  Description of Artificial Sequence: Synthetic peptide
EQVDRLVSA

SEQ ID NO: 11569 - protein, 8 aa, Artificial Sequence
  Description of Artificial Sequence: Synthetic peptide
DRLVSAGI

SEQ ID NO: 11570 - protein, 8 aa, Artificial Sequence
  Description of Artificial Sequence: Synthetic peptide
LQAIHLAL

SEQ ID NO: 11571 - protein, 9 aa, Artificial Sequence
  Description of Artificial Sequence: Synthetic peptide
TEAVQKIAL

SEQ ID NO: 11572 - protein, 8 aa, Artificial Sequence
  Description of Artificial Sequence: Synthetic peptide
GQMVHQAI

SEQ ID NO: 11573 - protein, 9 aa, Artificial Sequence
  Description of Artificial Sequence: Synthetic peptide
ERYLKDQQL

SEQ ID NO: 11574 - protein, 8 aa, Artificial Sequence
  Description of Artificial Sequence: Synthetic peptide
IQKLVGKL

SEQ ID NO: 11575 - protein, 9 aa, Artificial Sequence
  Description of Artificial Sequence: Synthetic peptide
ATKGLGISY

SEQ ID NO: 11576 - protein, 9 aa, Artificial Sequence
  Description of Artificial Sequence: Synthetic peptide
GQYPPLASL

SEQ ID NO: 11577 - protein, 9 aa, Artificial Sequence
  Description of Artificial Sequence: Synthetic peptide
GLFNESEKY

SEQ ID NO: 11578 - protein, 9 aa, Artificial Sequence
  Description of Artificial Sequence: Synthetic peptide
GLNSTNETF

SEQ ID NO: 11579 - protein, 9 aa, Artificial Sequence
  Description of Artificial Sequence: Synthetic peptide
TTKGLGISY

SEQ ID NO: 11580 - protein, 9 aa, Artificial Sequence
  Description of Artificial Sequence: Synthetic peptide
AIMMQKSNY

SEQ ID NO: 11581 - protein, 8 aa, Artificial Sequence
  Description of Artificial Sequence: Synthetic peptide
GQMVHQSL

SEQ ID NO: 11582 - protein, 9 aa, Artificial Sequence
  Description of Artificial Sequence: Synthetic peptide
SQANTTIMM

SEQ ID NO: 11583 - protein, 11 aa, Artificial Sequence
  Description of Artificial Sequence: Synthetic peptide
VQINKDDNRTY

SEQ ID NO: 11584 - protein, 9 aa, Artificial Sequence
  Description of Artificial Sequence: Synthetic peptide
RIGPGQSFY

SEQ ID NO: 11585 - protein, 9 aa, Artificial Sequence
  Description of Artificial Sequence: Synthetic peptide
TQWNNTLEY

SEQ ID NO: 11586 - protein, 9 aa, Artificial Sequence
  Description of Artificial Sequence: Synthetic peptide
AIMMQKSNF

SEQ ID NO: 11587 - protein, 10 aa, Artificial Sequence
  Description of Artificial Sequence: Synthetic peptide
GIHLGPGQTF

SEQ ID NO: 11588 - protein, 9 aa, Artificial Sequence
  Description of Artificial Sequence: Synthetic peptide
SQANSAIMM

SEQ ID NO: 11589 - protein, 11 aa, Artificial Sequence
  Description of Artificial Sequence: Synthetic peptide
IQKQGDGQWTY

SEQ ID NO: 11590 - protein, 11 aa, Artificial Sequence
  Description of Artificial Sequence: Synthetic peptide
GQSNNSDSETF

SEQ ID NO: 11591 - protein, 9 aa, Artificial Sequence
  Description of Artificial Sequence: Synthetic peptide
KQGDGQWTY

SEQ ID NO: 11592 - protein, 9 aa, Artificial Sequence
  Description of Artificial Sequence: Synthetic peptide
HLGPGQTFY

SEQ ID NO: 11593 - protein, 9 aa, Artificial Sequence
  Description of Artificial Sequence: Synthetic peptide
FLSAAGSTM

SEQ ID NO: 11594 - protein, 8 aa, Artificial Sequence
  Description of Artificial Sequence: Synthetic peptide
AVHVASEY

SEQ ID NO: 11595 - protein, 9 aa, Artificial Sequence
  Description of Artificial Sequence: Synthetic peptide
IGNNNSSEY

SEQ ID NO: 11596 - protein, 9 aa, Artificial Sequence
  Description of Artificial Sequence: Synthetic peptide
SQATNTAIM

SEQ ID NO: 11597 - protein, 9 aa, Artificial Sequence
  Description of Artificial Sequence: Synthetic peptide
EVKLVITTY

SEQ ID NO: 11598 - protein, 10 aa, Artificial Sequence
  Description of Artificial Sequence: Synthetic peptide
ISNNNSREEY

SEQ ID NO: 11599 - protein, 9 aa, Artificial Sequence
  Description of Artificial Sequence: Synthetic peptide
VAVHVASEY

SEQ ID NO: 11600 - protein, 9 aa, Artificial Sequence
  Description of Artificial Sequence: Synthetic peptide
HLGPGQAFY

SEQ ID NO: 11601 - protein, 9 aa, Artificial Sequence
  Description of Artificial Sequence: Synthetic peptide
VSNYSKEIY

SEQ ID NO: 11602 - protein, 9 aa, Artificial Sequence
  Description of Artificial Sequence: Synthetic peptide
AEKGVSQNY

SEQ ID NO: 11603 - protein, 8 aa, Artificial Sequence
  Description of Artificial Sequence: Synthetic peptide
AQYWSQEL

SEQ ID NO: 11604 - protein, 9 aa, Artificial Sequence
  Description of Artificial Sequence: Synthetic peptide
IIGDIKKAY

SEQ ID NO: 11605 - protein, 9 aa, Artificial Sequence
  Description of Artificial Sequence: Synthetic peptide
WQGVGQAMY

SEQ ID NO: 11606 - protein, 11 aa, Artificial Sequence
  Description of Artificial Sequence: Synthetic peptide
AAADKGVSQNY

SEQ ID NO: 11607 - protein, 9 aa, Artificial Sequence
  Description of Artificial Sequence: Synthetic peptide
KQVTKIQNF

SEQ ID NO: 11608 - protein, 9 aa, Artificial Sequence
  Description of Artificial Sequence: Synthetic peptide
ISNYSKTIY

SEQ ID NO: 11609 - protein, 11 aa, Artificial Sequence
  Description of Artificial Sequence: Synthetic peptide
SQISGESHTVL

SEQ ID NO: 11610 - protein, 10 aa, Artificial Sequence
  Description of Artificial Sequence: Synthetic peptide
SIHLGPGQAF

SEQ ID NO: 11611 - protein, 8 aa, Artificial Sequence
  Description of Artificial Sequence: Synthetic peptide
AELVITTY

SEQ ID NO: 11612 - protein, 10 aa, Artificial Sequence
  Description of Artificial Sequence: Synthetic peptide
MQWEKEISNY

SEQ ID NO: 11613 - protein, 10 aa, Artificial Sequence
  Description of Artificial Sequence: Synthetic peptide
QINKDDNRTY

SEQ ID NO: 11614 - protein, 9 aa, Artificial Sequence
  Description of Artificial Sequence: Synthetic peptide
FLKNVTENF

SEQ ID NO: 11615 - protein, 9 aa, Artificial Sequence
  Description of Artificial Sequence: Synthetic peptide
AVSPASREL

SEQ ID NO: 11616 - protein, 9 aa, Artificial Sequence
  Description of Artificial Sequence: Synthetic peptide
ALFNKTIKF

SEQ ID NO: 11617 - protein, 9 aa, Artificial Sequence
  Description of Artificial Sequence: Synthetic peptide
IRIGPGQSF

SEQ ID NO: 11618 - protein, 10 aa, Artificial Sequence
  Description of Artificial Sequence: Synthetic peptide
SIRIGPGQSF

SEQ ID NO: 11619 - protein, 8 aa, Artificial Sequence
  Description of Artificial Sequence: Synthetic peptide
GQHIYNTY

SEQ ID NO: 11620 - protein, 9 aa, Artificial Sequence
  Description of Artificial Sequence: Synthetic peptide
KQGQGQWTY

SEQ ID NO: 11621 - protein, 11 aa, Artificial Sequence
  Description of Artificial Sequence: Synthetic peptide
IQKQGQGQWTY

SEQ ID NO: 11622 - protein, 10 aa, Artificial Sequence
  Description of Artificial Sequence: Synthetic peptide
ILKEPVHGAY

SEQ ID NO: 11623 - protein, 8 aa, Artificial Sequence
  Description of Artificial Sequence: Synthetic peptide
GQYIYNTY

SEQ ID NO: 11624 - protein, 9 aa, Artificial Sequence
  Description of Artificial Sequence: Synthetic peptide
IQKQGQGQW

SEQ ID NO: 11625 - protein, 9 aa, Artificial Sequence
  Description of Artificial Sequence: Synthetic peptide
KQITKIQNF

SEQ ID NO: 11626 - protein, 9 aa, Artificial Sequence
  Description of Artificial Sequence: Synthetic peptide
IQQEFGIPY

SEQ ID NO: 11627 - protein, 9 aa, Artificial Sequence
  Description of Artificial Sequence: Synthetic peptide
TQIGCTLNF

SEQ ID NO: 11628 - protein, 9 aa, Artificial Sequence
  Description of Artificial Sequence: Synthetic peptide
KQIIKIQNF

SEQ ID NO: 11629 - protein, 10 aa, Artificial Sequence
  Description of Artificial Sequence: Synthetic peptide
ILKEPVHGVY

SEQ ID NO: 11630 - protein, 8 aa, Artificial Sequence
  Description of Artificial Sequence: Synthetic peptide
GQMVHQAI

SEQ ID NO: 11631 - protein, 9 aa, Artificial Sequence
  Description of Artificial Sequence: Synthetic peptide
TVLDVGDAY

SEQ ID NO: 11632 - protein, 8 aa, Artificial Sequence
  Description of Artificial Sequence: Synthetic peptide
AVHVASGY

SEQ ID NO: 11633 - protein, 9 aa, Artificial Sequence
  Description of Artificial Sequence: Synthetic peptide
FLGAAGSTM

SEQ ID NO: 11634 - protein, 9 aa, Artificial Sequence
  Description of Artificial Sequence: Synthetic peptide
FLSAAGSTM

SEQ ID NO: 11635 - protein, 9 aa, Artificial Sequence
  Description of Artificial Sequence: Synthetic peptide
EVKLVITTY

SEQ ID NO: 11636 - protein, 9 aa, Artificial Sequence
  Description of Artificial Sequence: Synthetic peptide
HLGPGQTFY

SEQ ID NO: 11637 - protein, 9 aa, Artificial Sequence
  Description of Artificial Sequence: Synthetic peptide
TQWNNTLEY

SEQ ID NO: 11638 - protein, 9 aa, Artificial Sequence
  Description of Artificial Sequence: Synthetic peptide
TTKGLGISY

SEQ ID NO: 11639 - protein, 8 aa, Artificial Sequence
  Description of Artificial Sequence: Synthetic peptide
DQLIHIYY

SEQ ID NO: 11640 - protein, 9 aa, Artificial Sequence
  Description of Artificial Sequence: Synthetic peptide
GLFNESEKY

SEQ ID NO: 11641 - protein, 9 aa, Artificial Sequence
  Description of Artificial Sequence: Synthetic peptide
HLGPGQAFY

SEQ ID NO: 11642 - protein, 9 aa, Artificial Sequence
  Description of Artificial Sequence: Synthetic peptide
EAKLVVTTY

SEQ ID NO: 11643 - protein, 9 aa, Artificial Sequence
  Description of Artificial Sequence: Synthetic peptide
ELYPPLASL

SEQ ID NO: 11644 - protein, 9 aa, Artificial Sequence
  Description of Artificial Sequence: Synthetic peptide
SQANTTIMM

SEQ ID NO: 11645 - protein, 9 aa, Artificial Sequence
  Description of Artificial Sequence: Synthetic peptide
SQATNTAIM

SEQ ID NO: 11646 - protein, 9 aa, Artificial Sequence
  Description of Artificial Sequence: Synthetic peptide
NATTTNDTL

SEQ ID NO: 11647 - protein, 9 aa, Artificial Sequence
  Description of Artificial Sequence: Synthetic peptide
FISGDINNL

SEQ ID NO: 11648 - protein, 11 aa, Artificial Sequence
  Description of Artificial Sequence: Synthetic peptide
VPIGNNNSSEY

SEQ ID NO: 11649 - protein, 10 aa, Artificial Sequence
  Description of Artificial Sequence: Synthetic peptide
EINNYSNTIY

SEQ ID NO: 11650 - protein, 10 aa, Artificial Sequence
  Description of Artificial Sequence: Synthetic peptide
NMWQGVGQAM

SEQ ID NO: 11651 - protein, 9 aa, Artificial Sequence
  Description of Artificial Sequence: Synthetic peptide
FPNNTAIKF

SEQ ID NO: 11652 - protein, 9 aa, Artificial Sequence
  Description of Artificial Sequence: Synthetic peptide
SQANSAIMM

SEQ ID NO: 11653 - protein, 8 aa, Artificial Sequence
  Description of Artificial Sequence: Synthetic peptide
HLGPGQTF

SEQ ID NO: 11654 - protein, 9 aa, Artificial Sequence
  Description of Artificial Sequence: Synthetic peptide
GQYPPLASL

SEQ ID NO: 11655 - protein, 8 aa, Artificial Sequence
  Description of Artificial Sequence: Synthetic peptide
HLGPGQAF

SEQ ID NO: 11656 - protein, 8 aa, Artificial Sequence
  Description of Artificial Sequence: Synthetic peptide
TAFTIPSL

SEQ ID NO: 11657 - protein, 9 aa, Artificial Sequence
  Description of Artificial Sequence: Synthetic peptide
GLNSTNETF

SEQ ID NO: 11658 - protein, 10 aa, Artificial Sequence
  Description of Artificial Sequence: Synthetic peptide
SIHLGPGQAF

SEQ ID NO: 11659 - protein, 8 aa, Artificial Sequence
  Description of Artificial Sequence: Synthetic peptide
YLGNLTQY

SEQ ID NO: 11660 - protein, 9 aa, Artificial Sequence
  Description of Artificial Sequence: Synthetic peptide
TLSDQSSTL

SEQ ID NO: 11661 - protein, 9 aa, Artificial Sequence
  Description of Artificial Sequence: Synthetic peptide
FLKNVTENF

SEQ ID NO: 11662 - protein, 10 aa, Artificial Sequence
  Description of Artificial Sequence: Synthetic peptide
SIRIGPGQSF

SEQ ID NO: 11663 - protein, 9 aa, Artificial Sequence
  Description of Artificial Sequence: Synthetic peptide
IRIGPGQSF

SEQ ID NO: 11664 - protein, 8 aa, Artificial Sequence
  Description of Artificial Sequence: Synthetic peptide
GQYIYNTY

SEQ ID NO: 11665 - protein, 9 aa, Artificial Sequence
  Description of Artificial Sequence: Synthetic peptide
AAVDLSHFL

SEQ ID NO: 11666 - protein, 9 aa, Artificial Sequence
  Description of Artificial Sequence: Synthetic peptide
TVGGHQAAM

SEQ ID NO: 11667 - protein, 9 aa, Artificial Sequence
  Description of Artificial Sequence: Synthetic peptide
DIAGTTSTL

SEQ ID NO: 11668 - protein, 9 aa, Artificial Sequence
  Description of Artificial Sequence: Synthetic peptide
TVLDVGDAY

SEQ ID NO: 11669 - protein, 9 aa, Artificial Sequence
  Description of Artificial Sequence: Synthetic peptide
FLGAAGSTM

SEQ ID NO: 11670 - protein, 10 aa, Artificial Sequence
  Description of Artificial Sequence: Synthetic peptide
EVNIVTDSQY

SEQ ID NO: 11671 - protein, 8 aa, Artificial Sequence
  Description of Artificial Sequence: Synthetic peptide
AKLVVTTY

SEQ ID NO: 11672 - protein, 8 aa, Artificial Sequence
  Description of Artificial Sequence: Synthetic peptide
VKLVITTY

SEQ ID NO: 11673 - protein, 9 aa, Artificial Sequence
  Description of Artificial Sequence: Synthetic peptide
AKNPDIVIY

SEQ ID NO: 11674 - protein, 9 aa, Artificial Sequence
  Description of Artificial Sequence: Synthetic peptide
QKAELQAIY

SEQ ID NO: 11675 - protein, 9 aa, Artificial Sequence
  Description of Artificial Sequence: Synthetic peptide
GQYPPLASL

SEQ ID NO: 11676 - protein, 8 aa, Artificial Sequence
  Description of Artificial Sequence: Synthetic peptide
GQMVHQSL

SEQ ID NO: 11677 - protein, 9 aa, Artificial Sequence
  Description of Artificial Sequence: Synthetic peptide
ATKGLGISY

SEQ ID NO: 11678 - protein, 9 aa, Artificial Sequence
  Description of Artificial Sequence: Synthetic peptide
GLFNESEKY

SEQ ID NO: 11679 - protein, 9 aa, Artificial Sequence
  Description of Artificial Sequence: Synthetic peptide
TQWNNTLEY

SEQ ID NO: 11680 - protein, 10 aa, Artificial Sequence
  Description of Artificial Sequence: Synthetic peptide
LKYLGNLTQY

SEQ ID NO: 11681 - protein, 9 aa, Artificial Sequence
  Description of Artificial Sequence: Synthetic peptide
TTKGLGISY

SEQ ID NO: 11682 - protein, 8 aa, Artificial Sequence
  Description of Artificial Sequence: Synthetic peptide
VKAKLGSY

SEQ ID NO: 11683 - protein, 9 aa, Artificial Sequence
  Description of Artificial Sequence: Synthetic peptide
MKNPDIVIY

SEQ ID NO: 11684 - protein, 9 aa, Artificial Sequence
  Description of Artificial Sequence: Synthetic peptide
GLNSTNETF

SEQ ID NO: 11685 - protein, 9 aa, Artificial Sequence
  Description of Artificial Sequence: Synthetic peptide
IRIGPGQSF

SEQ ID NO: 11686 - protein, 8 aa, Artificial Sequence
  Description of Artificial Sequence: Synthetic peptide
GQHIYNTY

SEQ ID NO: 11687 - protein, 9 aa, Artificial Sequence
  Description of Artificial Sequence: Synthetic peptide
KQGQGQWTY

SEQ ID NO: 11688 - protein, 8 aa, Artificial Sequence
  Description of Artificial Sequence: Synthetic peptide
GQYIYNTY

SEQ ID NO: 11689 - protein, 8 aa, Artificial Sequence
  Description of Artificial Sequence: Synthetic peptide
HKAIGTVL

SEQ ID NO: 11690 - protein, 9 aa, Artificial Sequence
  Description of Artificial Sequence: Synthetic peptide
KQITKIQNF

SEQ ID NO: 11691 - protein, 8 aa, Artificial Sequence
  Description of Artificial Sequence: Synthetic peptide
TKGLGISY

SEQ ID NO: 11692 - protein, 9 aa, Artificial Sequence
  Description of Artificial Sequence: Synthetic peptide
SKIGPENPY

SEQ ID NO: 11693 - protein, 9 aa, Artificial Sequence
  Description of Artificial Sequence: Synthetic peptide
VKVIEEKAF

SEQ ID NO: 11694 - protein, 9 aa, Artificial Sequence
  Description of Artificial Sequence: Synthetic peptide
SHFPNNTAI

SEQ ID NO: 11695 - protein, 9 aa, Artificial Sequence
  Description of Artificial Sequence: Synthetic peptide
GQYPPLASL

SEQ ID NO: 11696 - protein, 10 aa, Artificial Sequence
  Description of Artificial Sequence: Synthetic peptide
VHQPISPRTL

SEQ ID NO: 11697 - protein, 9 aa, Artificial Sequence
  Description of Artificial Sequence: Synthetic peptide
GHRAIGTVL

SEQ ID NO: 11698 - protein, 10 aa, Artificial Sequence
  Description of Artificial Sequence: Synthetic peptide
HQDPVPKQPL

SEQ ID NO: 11699 - protein, 9 aa, Artificial Sequence
  Description of Artificial Sequence: Synthetic peptide
AHTNDIKEL

SEQ ID NO: 11700 - protein, 9 aa, Artificial Sequence
  Description of Artificial Sequence: Synthetic peptide
FQQGEARKL

SEQ ID NO: 11701 - protein, 11 aa, Artificial Sequence
  Description of Artificial Sequence: Synthetic peptide
IHQDPVPKQPL

SEQ ID NO: 11702 - protein, 9 aa, Artificial Sequence
  Description of Artificial Sequence: Synthetic peptide
HPAHAGPIL

SEQ ID NO: 11703 - protein, 9 aa, Artificial Sequence
  Description of Artificial Sequence: Synthetic peptide
IHLGPGQAF

SEQ ID NO: 11704 - protein, 8 aa, Artificial Sequence
  Description of Artificial Sequence: Synthetic peptide
HRAIGTVL

SEQ ID NO: 11705 - protein, 9 aa, Artificial Sequence
  Description of Artificial Sequence: Synthetic peptide
IHTDNGTNF

SEQ ID NO: 11706 - protein, 9 aa, Artificial Sequence
  Description of Artificial Sequence: Synthetic peptide
HRTPQSSQI

SEQ ID NO: 11707 - protein, 11 aa, Artificial Sequence
  Description of Artificial Sequence: Synthetic peptide
SQISGESHAVL

SEQ ID NO: 11708 - protein, 9 aa, Artificial Sequence
  Description of Artificial Sequence: Synthetic peptide
SQATNTAIM

SEQ ID NO: 11709 - protein, 9 aa, Artificial Sequence
  Description of Artificial Sequence: Synthetic peptide
IHLGPGQTF

SEQ ID NO: 11710 - protein, 10 aa, Artificial Sequence
  Description of Artificial Sequence: Synthetic peptide
VHIPLETAEL

SEQ ID NO: 11711 - protein, 8 aa, Artificial Sequence
  Description of Artificial Sequence: Synthetic peptide
MHTDIISL

SEQ ID NO: 11712 - protein, 9 aa, Artificial Sequence
  Description of Artificial Sequence: Synthetic peptide
HQSLSPRTL

SEQ ID NO: 11713 - protein, 9 aa, Artificial Sequence
  Description of Artificial Sequence: Synthetic peptide
IRIGPGQSF

SEQ ID NO: 11714 - protein, 9 aa, Artificial Sequence
  Description of Artificial Sequence: Synthetic peptide
THLEGKIIL

SEQ ID NO: 11715 - protein, 9 aa, Artificial Sequence
  Description of Artificial Sequence: Synthetic peptide
GHKAIGTVL

SEQ ID NO: 11716 - protein, 9 aa, Artificial Sequence
  Description of Artificial Sequence: Synthetic peptide
THLEGKVIL

SEQ ID NO: 11717 - protein, 8 aa, Artificial Sequence
  Description of Artificial Sequence: Synthetic peptide
THLEGKVI

SEQ ID NO: 11718 - protein, 9 aa, Artificial Sequence
  Description of Artificial Sequence: Synthetic peptide
AHTNDVKQL

SEQ ID NO: 11719 - protein, 9 aa, Artificial Sequence
  Description of Artificial Sequence: Synthetic peptide
SQIYPGIKV

SEQ ID NO: 11720 - protein, 9 aa, Artificial Sequence
  Description of Artificial Sequence: Synthetic peptide
HQAISPRTL

SEQ ID NO: 11721 - protein, 9 aa, Artificial Sequence
  Description of Artificial Sequence: Synthetic peptide
EHLKTAVQM

SEQ ID NO: 11722 - protein, 9 aa, Artificial Sequence
  Description of Artificial Sequence: Synthetic peptide
GHQAAMQML

SEQ ID NO: 11723 - protein, 9 aa, Artificial Sequence
  Description of Artificial Sequence: Synthetic peptide
FLSAAGSTM

SEQ ID NO: 11724 - protein, 9 aa, Artificial Sequence
  Description of Artificial Sequence: Synthetic peptide
TVLDVGDAY

SEQ ID NO: 11725 - protein, 9 aa, Artificial Sequence
  Description of Artificial Sequence: Synthetic peptide
TINEEAAEW

SEQ ID NO: 11726 - protein, 8 aa, Artificial Sequence
  Description of Artificial Sequence: Synthetic peptide
AELVITTY

SEQ ID NO: 11727 - protein, 8 aa, Artificial Sequence
  Description of Artificial Sequence: Synthetic peptide
DEWEKIQL

SEQ ID NO: 11728 - protein, 8 aa, Artificial Sequence
  Description of Artificial Sequence: Synthetic peptide
NESNIETF

SEQ ID NO: 11729 - protein, 10 aa, Artificial Sequence
  Description of Artificial Sequence: Synthetic peptide
EEVKLVITTY

SEQ ID NO: 11730 - protein, 9 aa, Artificial Sequence
  Description of Artificial Sequence: Synthetic peptide
DELFNDTKF

SEQ ID NO: 11731 - protein, 8 aa, Artificial Sequence
  Description of Artificial Sequence: Synthetic peptide
LEITMHSF

SEQ ID NO: 11732 - protein, 10 aa, Artificial Sequence
  Description of Artificial Sequence: Synthetic peptide
EEAELVITTY

SEQ ID NO: 11733 - protein, 8 aa, Artificial Sequence
  Description of Artificial Sequence: Synthetic peptide
LENVTERF

SEQ ID NO: 11734 - protein, 8 aa, Artificial Sequence
  Description of Artificial Sequence: Synthetic peptide
DEELLRAV

SEQ ID NO: 11735 - protein, 8 aa, Artificial Sequence
  Description of Artificial Sequence: Synthetic peptide
SEELKSLY

SEQ ID NO: 11736 - protein, 9 aa, Artificial Sequence
  Description of Artificial Sequence: Synthetic peptide
TELLKAVKY

SEQ ID NO: 11737 - protein, 9 aa, Artificial Sequence
  Description of Artificial Sequence: Synthetic peptide
TEAVQKISL

SEQ ID NO: 11738 - protein, 8 aa, Artificial Sequence
  Description of Artificial Sequence: Synthetic peptide
NETPGVRY

SEQ ID NO: 11739 - protein, 9 aa, Artificial Sequence
  Description of Artificial Sequence: Synthetic peptide
TEAVQKIAL

SEQ ID NO: 11740 - protein, 11 aa, Artificial Sequence
  Description of Artificial Sequence: Synthetic peptide
SEVNIVTDSQY

SEQ ID NO: 11741 - protein, 9 aa, Artificial Sequence
  Description of Artificial Sequence: Synthetic peptide
DEVGFPVRP

SEQ ID NO: 11742 - protein, 8 aa, Artificial Sequence
  Description of Artificial Sequence: Synthetic peptide
NETPGIRY

SEQ ID NO: 11743 - protein, 10 aa, Artificial Sequence
  Description of Artificial Sequence: Synthetic peptide
IRIGPGQSFY

SEQ ID NO: 11744 - protein, 11 aa, Artificial Sequence
  Description of Artificial Sequence: Synthetic peptide
SQANTTIMMQK

SEQ ID NO: 11745 - protein, 10 aa, Artificial Sequence
  Description of Artificial Sequence: Synthetic peptide
TRANNPDLAW

SEQ ID NO: 11746 - protein, 9 aa, Artificial Sequence
  Description of Artificial Sequence: Synthetic peptide
GRAVLNVPR

SEQ ID NO: 11747 - protein, 10 aa, Artificial Sequence
  Description of Artificial Sequence: Synthetic peptide
TRTTNPDLAW

SEQ ID NO: 11748 - protein, 9 aa, Artificial Sequence
  Description of Artificial Sequence: Synthetic peptide
ALTALVSPK

SEQ ID NO: 11749 - protein, 9 aa, Artificial Sequence
  Description of Artificial Sequence: Synthetic peptide
DRIIEVLQR

SEQ ID NO: 11750 - protein, 9 aa, Artificial Sequence
  Description of Artificial Sequence: Synthetic peptide
IRIGPGQSF

SEQ ID NO: 11751 - protein, 10 aa, Artificial Sequence
  Description of Artificial Sequence: Synthetic peptide
GAVDLSHFLK

SEQ ID NO: 11752 - protein, 11 aa, Artificial Sequence
  Description of Artificial Sequence: Synthetic peptide
KGGLEGLIYSK

SEQ ID NO: 11753 - protein, 10 aa, Artificial Sequence
  Description of Artificial Sequence: Synthetic peptide
GGLEGLIYSK

SEQ ID NO: 11754 - protein, 11 aa, Artificial Sequence
  Description of Artificial Sequence: Synthetic peptide
YATGEIIGDIR

SEQ ID NO: 11755 - protein, 9 aa, Artificial Sequence
  Description of Artificial Sequence: Synthetic peptide
SRIGPENPY

SEQ ID NO: 11756 - protein, 9 aa, Artificial Sequence
  Description of Artificial Sequence: Synthetic peptide
ARVLAVERY

SEQ ID NO: 11757 - protein, 9 aa, Artificial Sequence
  Description of Artificial Sequence: Synthetic peptide
SRIGIVPQR

SEQ ID NO: 11758 - protein, 9 aa, Artificial Sequence
  Description of Artificial Sequence: Synthetic peptide
GRAVLNVPR

SEQ ID NO: 11759 - protein, 10 aa, Artificial Sequence
  Description of Artificial Sequence: Synthetic peptide
KRFNGTGPCK

SEQ ID NO: 11760 - protein, 9 aa, Artificial Sequence
  Description of Artificial Sequence: Synthetic peptide
YRTQIDPGL

SEQ ID NO: 11761 - protein, 9 aa, Artificial Sequence
  Description of Artificial Sequence: Synthetic peptide
GRAVLNIPR

SEQ ID NO: 11762 - protein, 9 aa, Artificial Sequence
  Description of Artificial Sequence: Synthetic peptide
ERFAVDPGL

SEQ ID NO: 11763 - protein, 10 aa, Artificial Sequence
  Description of Artificial Sequence: Synthetic peptide
IRIGPGQSFY

SEQ ID NO: 11764 - protein, 9 aa, Artificial Sequence
  Description of Artificial Sequence: Synthetic peptide
ERFAIDPGL

SEQ ID NO: 11765 - protein, 9 aa, Artificial Sequence
  Description of Artificial Sequence: Synthetic peptide
IRIGPGQSF

SEQ ID NO: 11766 - protein, 9 aa, Artificial Sequence
  Description of Artificial Sequence: Synthetic peptide
GRAILNIPR

SEQ ID NO: 11767 - protein, 9 aa, Artificial Sequence
  Description of Artificial Sequence: Synthetic peptide
CRIKQIVNM

SEQ ID NO: 11768 - protein, 9 aa, Artificial Sequence
  Description of Artificial Sequence: Synthetic peptide
SRIGITRQR

SEQ ID NO: 11769 - protein, 9 aa, Artificial Sequence
  Description of Artificial Sequence: Synthetic peptide
SRIGIIRQR

SEQ ID NO: 11770 - protein, 9 aa, Artificial Sequence
  Description of Artificial Sequence: Synthetic peptide
SRIGPENPY

SEQ ID NO: 11771 - protein, 9 aa, Artificial Sequence
  Description of Artificial Sequence: Synthetic peptide
ARVLAVERY

SEQ ID NO: 11772 - protein, 11 aa, Artificial Sequence
  Description of Artificial Sequence: Synthetic peptide
VPIGNNNSSEY

SEQ ID NO: 11773 - protein, 9 aa, Artificial Sequence
  Description of Artificial Sequence: Synthetic peptide
FPNNTAIKF

SEQ ID NO: 11774 - protein, 9 aa, Artificial Sequence
  Description of Artificial Sequence: Synthetic peptide
EPIAGADTF

SEQ ID NO: 11775 - protein, 11 aa, Artificial Sequence
  Description of Artificial Sequence: Synthetic peptide
IPAETGQDTAY

SEQ ID NO: 11776 - protein, 9 aa, Artificial Sequence
  Description of Artificial Sequence: Synthetic peptide
TAELVITTY

SEQ ID NO: 11777 - protein, 11 aa, Artificial Sequence
  Description of Artificial Sequence: Synthetic peptide
IPINNSSSSDY

SEQ ID NO: 11778 - protein, 10 aa, Artificial Sequence
  Description of Artificial Sequence: Synthetic peptide
TAEKGVSQNY

SEQ ID NO: 11779 - protein, 9 aa, Artificial Sequence
  Description of Artificial Sequence: Synthetic peptide
EAELVITTY

SEQ ID NO: 11780 - protein, 9 aa, Artificial Sequence
  Description of Artificial Sequence: Synthetic peptide
VPNNGTITL

SEQ ID NO: 11781 - protein, 9 aa, Artificial Sequence
  Description of Artificial Sequence: Synthetic peptide
HPAHAGPIL

SEQ ID NO: 11782 - protein, 9 aa, Artificial Sequence
  Description of Artificial Sequence: Synthetic peptide
QAIEAQQHM

SEQ ID NO: 11783 - protein, 11 aa, Artificial Sequence
  Description of Artificial Sequence: Synthetic peptide
VPTDPNPQEVF

SEQ ID NO: 11784 - protein, 9 aa, Artificial Sequence
  Description of Artificial Sequence: Synthetic peptide
EAKLVVTTY

SEQ ID NO: 11785 - protein, 9 aa, Artificial Sequence
  Description of Artificial Sequence: Synthetic peptide
VAVHVASEY

SEQ ID NO: 11786 - protein, 9 aa, Artificial Sequence
  Description of Artificial Sequence: Synthetic peptide
SPAIFQYSM

SEQ ID NO: 11787 - protein, 9 aa, Artificial Sequence
  Description of Artificial Sequence: Synthetic peptide
PPVPVGEMY

SEQ ID NO: 11788 - protein, 9 aa, Artificial Sequence
  Description of Artificial Sequence: Synthetic peptide
DPNPQEVAL

SEQ ID NO: 11789 - protein, 9 aa, Artificial Sequence
  Description of Artificial Sequence: Synthetic peptide
NPIAGNITC

SEQ ID NO: 11790 - protein, 10 aa, Artificial Sequence
  Description of Artificial Sequence: Synthetic peptide
FATKGLGISY

SEQ ID NO: 11791 - protein, 9 aa, Artificial Sequence
  Description of Artificial Sequence: Synthetic peptide
TPTDLNTML

SEQ ID NO: 11792 - protein, 8 aa, Artificial Sequence
  Description of Artificial Sequence: Synthetic peptide
FPNATIKF

SEQ ID NO: 11793 - protein, 9 aa, Artificial Sequence
  Description of Artificial Sequence: Synthetic peptide
QATNAAIMM

SEQ ID NO: 11794 - protein, 9 aa, Artificial Sequence
  Description of Artificial Sequence: Synthetic peptide
EVKLVITTY

SEQ ID NO: 11795 - protein, 9 aa, Artificial Sequence
  Description of Artificial Sequence: Synthetic peptide
QATNTAIMM

SEQ ID NO: 11796 - protein, 9 aa, Artificial Sequence
  Description of Artificial Sequence: Synthetic peptide
FPVSPIETV

SEQ ID NO: 11797 - protein, 10 aa, Artificial Sequence
  Description of Artificial Sequence: Synthetic peptide
EPIAGADTFY

SEQ ID NO: 11798 - protein, 9 aa, Artificial Sequence
  Description of Artificial Sequence: Synthetic peptide
VPLTTEAEL

SEQ ID NO: 11799 - protein, 9 aa, Artificial Sequence
  Description of Artificial Sequence: Synthetic peptide
DPNPQEVVL

SEQ ID NO: 11800 - protein, 9 aa, Artificial Sequence
  Description of Artificial Sequence: Synthetic peptide
PPVPVGDIY

SEQ ID NO: 11801 - protein, 10 aa, Artificial Sequence
  Description of Artificial Sequence: Synthetic peptide
NPPVPVGDIY

SEQ ID NO: 11802 - protein, 9 aa, Artificial Sequence
  Description of Artificial Sequence: Synthetic peptide
VPLTEEAEL

SEQ ID NO: 11803 - protein, 9 aa, Artificial Sequence
  Description of Artificial Sequence: Synthetic peptide
EPIIGAETF

SEQ ID NO: 11804 - protein, 9 aa, Artificial Sequence
  Description of Artificial Sequence: Synthetic peptide
NPDIVIYQY

SEQ ID NO: 11805 - protein, 9 aa, Artificial Sequence
  Description of Artificial Sequence: Synthetic peptide
EPIAGAETF

SEQ ID NO: 11806 - protein, 10 aa, Artificial Sequence
  Description of Artificial Sequence: Synthetic peptide
EPIAGAETFY

SEQ ID NO: 11807 - protein, 9 aa, Artificial Sequence
  Description of Artificial Sequence: Synthetic peptide
EPIVGAETF

SEQ ID NO: 11808 - protein, 8 aa, Artificial Sequence
  Description of Artificial Sequence: Synthetic peptide
TPGPGIRY

SEQ ID NO: 11809 - protein, 11 aa, Artificial Sequence
  Description of Artificial Sequence: Synthetic peptide
IPAETGQETAY

SEQ ID NO: 11810 - protein, 9 aa, Artificial Sequence
  Description of Artificial Sequence: Synthetic peptide
TVLDVGDAY

SEQ ID NO: 11811 - protein, 9 aa, Artificial Sequence
  Description of Artificial Sequence: Synthetic peptide
SPAIFQSSM

SEQ ID NO: 11812 - protein, 9 aa, Artificial Sequence
  Description of Artificial Sequence: Synthetic peptide
FPISPIETV

SEQ ID NO: 11813 - protein, 9 aa, Artificial Sequence
  Description of Artificial Sequence: Synthetic peptide
DPNPQEVAL

SEQ ID NO: 11814 - protein, 9 aa, Artificial Sequence
  Description of Artificial Sequence: Synthetic peptide
HPAHAGPIL

SEQ ID NO: 11815 - protein, 9 aa, Artificial Sequence
  Description of Artificial Sequence: Synthetic peptide
VPLTTEAEL

SEQ ID NO: 11816 - protein, 9 aa, Artificial Sequence
  Description of Artificial Sequence: Synthetic peptide
EPIAGADTF

SEQ ID NO: 11817 - protein, 9 aa, Artificial Sequence
  Description of Artificial Sequence: Synthetic peptide
SPASGELRV

SEQ ID NO: 11818 - protein, 8 aa, Artificial Sequence
  Description of Artificial Sequence: Synthetic peptide
IPLEEVKL

SEQ ID NO: 11819 - protein, 9 aa, Artificial Sequence
  Description of Artificial Sequence: Synthetic peptide
TPTDLNTML

SEQ ID NO: 11820 - protein, 8 aa, Artificial Sequence
  Description of Artificial Sequence: Synthetic peptide
IPLEEAEL

SEQ ID NO: 11821 - protein, 9 aa, Artificial Sequence
  Description of Artificial Sequence: Synthetic peptide
NATTTNDTL

SEQ ID NO: 11822 - protein, 9 aa, Artificial Sequence
  Description of Artificial Sequence: Synthetic peptide
DPNPQEVFL

SEQ ID NO: 11823 - protein, 8 aa, Artificial Sequence
  Description of Artificial Sequence: Synthetic peptide
YVGSDLEL

SEQ ID NO: 11824 - protein, 8 aa, Artificial Sequence
  Description of Artificial Sequence: Synthetic peptide
IPLEEAKL

SEQ ID NO: 11825 - protein, 9 aa, Artificial Sequence
  Description of Artificial Sequence: Synthetic peptide
DTIAINDTL

SEQ ID NO: 11826 - protein, 9 aa, Artificial Sequence
  Description of Artificial Sequence: Synthetic peptide
FPVSPIETV

SEQ ID NO: 11827 - protein, 9 aa, Artificial Sequence
  Description of Artificial Sequence: Synthetic peptide
IVTDSQYVL

SEQ ID NO: 11828 - protein, 9 aa, Artificial Sequence
  Description of Artificial Sequence: Synthetic peptide
DPNPQEVVL

SEQ ID NO: 11829 - protein, 9 aa, Artificial Sequence
  Description of Artificial Sequence: Synthetic peptide
VPLTAEAEL

SEQ ID NO: 11830 - protein, 9 aa, Artificial Sequence
  Description of Artificial Sequence: Synthetic peptide
VPLTEEAEL

SEQ ID NO: 11831 - protein, 9 aa, Artificial Sequence
  Description of Artificial Sequence: Synthetic peptide
EPIAGAETF

SEQ ID NO: 11832 - protein, 9 aa, Artificial Sequence
  Description of Artificial Sequence: Synthetic peptide
QPDKSESEL

SEQ ID NO: 11833 - protein, 9 aa, Artificial Sequence
  Description of Artificial Sequence: Synthetic peptide
FPISPIETV

SEQ ID NO: 11834 - protein, 9 aa, Artificial Sequence
  Description of Artificial Sequence: Synthetic peptide
HPAHAGPIL

SEQ ID NO: 11835 - protein, 9 aa, Artificial Sequence
  Description of Artificial Sequence: Synthetic peptide
DPNPQEVAL

SEQ ID NO: 11836 - protein, 9 aa, Artificial Sequence
  Description of Artificial Sequence: Synthetic peptide
TPTDLNTML

SEQ ID NO: 11837 - protein, 9 aa, Artificial Sequence
  Description of Artificial Sequence: Synthetic peptide
VPNNGTITL

SEQ ID NO: 11838 - protein, 9 aa, Artificial Sequence
  Description of Artificial Sequence: Synthetic peptide
VPLTTEAEL

SEQ ID NO: 11839 - protein, 9 aa, Artificial Sequence
  Description of Artificial Sequence: Synthetic peptide
FPNNTAIKF

SEQ ID NO: 11840 - protein, 9 aa, Artificial Sequence
  Description of Artificial Sequence: Synthetic peptide
NPIAGNITC

SEQ ID NO: 11841 - protein, 9 aa, Artificial Sequence
  Description of Artificial Sequence: Synthetic peptide
FPVSPIETV

SEQ ID NO: 11842 - protein, 9 aa, Artificial Sequence
  Description of Artificial Sequence: Synthetic peptide
EPIAGADTF

SEQ ID NO: 11843 - protein, 9 aa, Artificial Sequence
  Description of Artificial Sequence: Synthetic peptide
FISGDINNL

SEQ ID NO: 11844 - protein, 9 aa, Artificial Sequence
  Description of Artificial Sequence: Synthetic peptide
SPIAGNITC

SEQ ID NO: 11845 - protein, 11 aa, Artificial Sequence
  Description of Artificial Sequence: Synthetic peptide
VPLTTEAELEL

SEQ ID NO: 11846 - protein, 9 aa, Artificial Sequence
  Description of Artificial Sequence: Synthetic peptide
NATTTNDTL

SEQ ID NO: 11847 - protein, 9 aa, Artificial Sequence
  Description of Artificial Sequence: Synthetic peptide
QATNTAIMM

SEQ ID NO: 11848 - protein, 9 aa, Artificial Sequence
  Description of Artificial Sequence: Synthetic peptide
QAIEAQQHM

SEQ ID NO: 11849 - protein, 11 aa, Artificial Sequence
  Description of Artificial Sequence: Synthetic peptide
VPTDPNPQEVF

SEQ ID NO: 11850 - protein, 9 aa, Artificial Sequence
  Description of Artificial Sequence: Synthetic peptide
DPNPQEVFL

SEQ ID NO: 11851 - protein, 8 aa, Artificial Sequence
  Description of Artificial Sequence: Synthetic peptide
IPGDVNNL

SEQ ID NO: 11852 - protein, 9 aa, Artificial Sequence
  Description of Artificial Sequence: Synthetic peptide
QATNAAIMM

SEQ ID NO: 11853 - protein, 8 aa, Artificial Sequence
  Description of Artificial Sequence: Synthetic peptide
IPGDINNL

SEQ ID NO: 11854 - protein, 8 aa, Artificial Sequence
  Description of Artificial Sequence: Synthetic peptide
IPLEEAEL

SEQ ID NO: 11855 - protein, 9 aa, Artificial Sequence
  Description of Artificial Sequence: Synthetic peptide
VPLTAEANL

SEQ ID NO: 11856 - protein, 8 aa, Artificial Sequence
  Description of Artificial Sequence: Synthetic peptide
YVGSDLEL

SEQ ID NO: 11857 - protein, 9 aa, Artificial Sequence
  Description of Artificial Sequence: Synthetic peptide
DTIAINDTL

SEQ ID NO: 11858 - protein, 9 aa, Artificial Sequence
  Description of Artificial Sequence: Synthetic peptide
HPTQAGPIP

SEQ ID NO: 11859 - protein, 9 aa, Artificial Sequence
  Description of Artificial Sequence: Synthetic peptide
APIAGNITC

SEQ ID NO: 11860 - protein, 10 aa, Artificial Sequence
  Description of Artificial Sequence: Synthetic peptide
NANPDCKIIL

SEQ ID NO: 11861 - protein, 8 aa, Artificial Sequence
  Description of Artificial Sequence: Synthetic peptide
NPIPEQPL

SEQ ID NO: 11862 - protein, 10 aa, Artificial Sequence
  Description of Artificial Sequence: Synthetic peptide
QAIEAQQHML

SEQ ID NO: 11863 - protein, 9 aa, Artificial Sequence
  Description of Artificial Sequence: Synthetic peptide
IVTDSQYVL

SEQ ID NO: 11864 - protein, 9 aa, Artificial Sequence
  Description of Artificial Sequence: Synthetic peptide
DPNPQEVVL

SEQ ID NO: 11865 - protein, 9 aa, Artificial Sequence
  Description of Artificial Sequence: Synthetic peptide
VPLTAEAEL

SEQ ID NO: 11866 - protein, 11 aa, Artificial Sequence
  Description of Artificial Sequence: Synthetic peptide
VPLTAEAELEL

SEQ ID NO: 11867 - protein, 9 aa, Artificial Sequence
  Description of Artificial Sequence: Synthetic peptide
VPLTEEAEL

SEQ ID NO: 11868 - protein, 11 aa, Artificial Sequence
  Description of Artificial Sequence: Synthetic peptide
VPLTEEAELEL

SEQ ID NO: 11869 - protein, 9 aa, Artificial Sequence
  Description of Artificial Sequence: Synthetic peptide
EPIIGAETF

SEQ ID NO: 11870 - protein, 9 aa, Artificial Sequence
  Description of Artificial Sequence: Synthetic peptide
EPIAGAETF

SEQ ID NO: 11871 - protein, 9 aa, Artificial Sequence
  Description of Artificial Sequence: Synthetic peptide
EPIVGAETF

SEQ ID NO: 11872 - protein, 9 aa, Artificial Sequence
  Description of Artificial Sequence: Synthetic peptide
QPDKSESEL

SEQ ID NO: 11873 - protein, 9 aa, Artificial Sequence
  Description of Artificial Sequence: Synthetic peptide
TPQDLNTML

SEQ ID NO: 11874 - protein, 10 aa, Artificial Sequence
  Description of Artificial Sequence: Synthetic peptide
NANPDCKTIL

SEQ ID NO: 11875 - protein, 9 aa, Artificial Sequence
  Description of Artificial Sequence: Synthetic peptide
FPISPIETV

SEQ ID NO: 11876 - protein, 9 aa, Artificial Sequence
  Description of Artificial Sequence: Synthetic peptide
IVTDSQYAL

SEQ ID NO: 11877 - protein, 10 aa, Artificial Sequence
  Description of Artificial Sequence: Synthetic peptide
SPIETVPVKL

SEQ ID NO: 11878 - protein, 11 aa, Artificial Sequence
  Description of Artificial Sequence: Synthetic peptide
IPAETGQDTAY

SEQ ID NO: 11879 - protein, 9 aa, Artificial Sequence
  Description of Artificial Sequence: Synthetic peptide
EPIAGADTF

SEQ ID NO: 11880 - protein, 9 aa, Artificial Sequence
  Description of Artificial Sequence: Synthetic peptide
TAELVITTY

SEQ ID NO: 11881 - protein, 11 aa, Artificial Sequence
  Description of Artificial Sequence: Synthetic peptide
VPIGNNNSSEY

SEQ ID NO: 11882 - protein, 9 aa, Artificial Sequence
  Description of Artificial Sequence: Synthetic peptide
FPNNTAIKF

SEQ ID NO: 11883 - protein, 9 aa, Artificial Sequence
  Description of Artificial Sequence: Synthetic peptide
EAELVITTY

SEQ ID NO: 11884 - protein, 11 aa, Artificial Sequence
  Description of Artificial Sequence: Synthetic peptide
VPTDPNPQEVF

SEQ ID NO: 11885 - protein, 10 aa, Artificial Sequence
  Description of Artificial Sequence: Synthetic peptide
TAEKGVSQNY

SEQ ID NO: 11886 - protein, 9 aa, Artificial Sequence
  Description of Artificial Sequence: Synthetic peptide
DPNPQEVAL

SEQ ID NO: 11887 - protein, 9 aa, Artificial Sequence
  Description of Artificial Sequence: Synthetic peptide
VPLTTEAEL

SEQ ID NO: 11888 - protein, 9 aa, Artificial Sequence
  Description of Artificial Sequence: Synthetic peptide
HPAHAGPIL

SEQ ID NO: 11889 - protein, 9 aa, Artificial Sequence
  Description of Artificial Sequence: Synthetic peptide
DPNPQEVVL

SEQ ID NO: 11890 - protein, 9 aa, Artificial Sequence
  Description of Artificial Sequence: Synthetic peptide
VPLTEEAEL

SEQ ID NO: 11891 - protein, 10 aa, Artificial Sequence
  Description of Artificial Sequence: Synthetic peptide
NPPVPVGDIY

SEQ ID NO: 11892 - protein, 9 aa, Artificial Sequence
  Description of Artificial Sequence: Synthetic peptide
PPVPVGDIY

SEQ ID NO: 11893 - protein, 9 aa, Artificial Sequence
  Description of Artificial Sequence: Synthetic peptide
EPIIGAETF

SEQ ID NO: 11894 - protein, 9 aa, Artificial Sequence
  Description of Artificial Sequence: Synthetic peptide
NPDIVIYQY

SEQ ID NO: 11895 - protein, 9 aa, Artificial Sequence
  Description of Artificial Sequence: Synthetic peptide
EPIAGAETF

SEQ ID NO: 11896 - protein, 9 aa, Artificial Sequence
  Description of Artificial Sequence: Synthetic peptide
EPIVGAETF

SEQ ID NO: 11897 - protein, 8 aa, Artificial Sequence
  Description of Artificial Sequence: Synthetic peptide
TPGPGIRY

SEQ ID NO: 11898 - protein, 11 aa, Artificial Sequence
  Description of Artificial Sequence: Synthetic peptide
IPAETGQETAY

SEQ ID NO: 11899 - protein, 9 aa, Artificial Sequence
  Description of Artificial Sequence: Synthetic peptide
TVLDVGDAY

SEQ ID NO: 11900 - protein, 9 aa, Artificial Sequence
  Description of Artificial Sequence: Synthetic peptide
DPNPQEVAL

SEQ ID NO: 11901 - protein, 9 aa, Artificial Sequence
  Description of Artificial Sequence: Synthetic peptide
HPAHAGPIL

SEQ ID NO: 11902 - protein, 9 aa, Artificial Sequence
  Description of Artificial Sequence: Synthetic peptide
VPLTTEAEL

SEQ ID NO: 11903 - protein, 9 aa, Artificial Sequence
  Description of Artificial Sequence: Synthetic peptide
EPIAGADTF

SEQ ID NO: 11904 - protein, 8 aa, Artificial Sequence
  Description of Artificial Sequence: Synthetic peptide
IPLEEVKL

SEQ ID NO: 11905 - protein, 9 aa, Artificial Sequence
  Description of Artificial Sequence: Synthetic peptide
DPNPQEVFL

SEQ ID NO: 11906 - protein, 9 aa, Artificial Sequence
  Description of Artificial Sequence: Synthetic peptide
SPASGELRV

SEQ ID NO: 11907 - protein, 9 aa, Artificial Sequence
  Description of Artificial Sequence: Synthetic peptide
SPIAGNITC

SEQ ID NO: 11908 - protein, 8 aa, Artificial Sequence
  Description of Artificial Sequence: Synthetic peptide
IPLEEAEL

SEQ ID NO: 11909 - protein, 9 aa, Artificial Sequence
  Description of Artificial Sequence: Synthetic peptide
DTIAINDTL

SEQ ID NO: 11910 - protein, 9 aa, Artificial Sequence
  Description of Artificial Sequence: Synthetic peptide
TPTDLNTML

SEQ ID NO: 11911 - protein, 8 aa, Artificial Sequence
  Description of Artificial Sequence: Synthetic peptide
YVGSDLEL

SEQ ID NO: 11912 - protein, 11 aa, Artificial Sequence
  Description of Artificial Sequence: Synthetic peptide
VPTDPNPQEVF

SEQ ID NO: 11913 - protein, 11 aa, Artificial Sequence
  Description of Artificial Sequence: Synthetic peptide
VPLTTEAELEL

SEQ ID NO: 11914 - protein, 8 aa, Artificial Sequence
  Description of Artificial Sequence: Synthetic peptide
IPLEEAKL

SEQ ID NO: 11915 - protein, 9 aa, Artificial Sequence
  Description of Artificial Sequence: Synthetic peptide
FPVSPIETV

SEQ ID NO: 11916 - protein, 9 aa, Artificial Sequence
  Description of Artificial Sequence: Synthetic peptide
VPNNGTITL

SEQ ID NO: 11917 - protein, 9 aa, Artificial Sequence
  Description of Artificial Sequence: Synthetic peptide
MDDEDREVL

SEQ ID NO: 11918 - protein, 9 aa, Artificial Sequence
  Description of Artificial Sequence: Synthetic peptide
NATTTNDTL

SEQ ID NO: 11919 - protein, 9 aa, Artificial Sequence
  Description of Artificial Sequence: Synthetic peptide
FISGDINNL

SEQ ID NO: 11920 - protein, 9 aa, Artificial Sequence
  Description of Artificial Sequence: Synthetic peptide
NPIAGNITC

SEQ ID NO: 11921 - protein, 9 aa, Artificial Sequence
  Description of Artificial Sequence: Synthetic peptide
IVTDSQYVL

SEQ ID NO: 11922 - protein, 9 aa, Artificial Sequence
  Description of Artificial Sequence: Synthetic peptide
DPNPQEVVL

SEQ ID NO: 11923 - protein, 9 aa, Artificial Sequence
  Description of Artificial Sequence: Synthetic peptide
VPLTAEAEL

SEQ ID NO: 11924 - protein, 9 aa, Artificial Sequence
  Description of Artificial Sequence: Synthetic peptide
VPLTEEAEL

SEQ ID NO: 11925 - protein, 11 aa, Artificial Sequence
  Description of Artificial Sequence: Synthetic peptide
VPLTEEAELEL

SEQ ID NO: 11926 - protein, 8 aa, Artificial Sequence
  Description of Artificial Sequence: Synthetic peptide
DPDLADQL

SEQ ID NO: 11927 - protein, 9 aa, Artificial Sequence
  Description of Artificial Sequence: Synthetic peptide
EPIAGAETF

SEQ ID NO: 11928 - protein, 9 aa, Artificial Sequence
  Description of Artificial Sequence: Synthetic peptide
EPIVGAETF

SEQ ID NO: 11929 - protein, 9 aa, Artificial Sequence
  Description of Artificial Sequence: Synthetic peptide
QPDKSESEL

SEQ ID NO: 11930 - protein, 9 aa, Artificial Sequence
  Description of Artificial Sequence: Synthetic peptide
FPISPIETV

SEQ ID NO: 11931 - protein, 8 aa, Artificial Sequence
  Description of Artificial Sequence: Synthetic peptide
NESNIETF

SEQ ID NO: 11932 - protein, 9 aa, Artificial Sequence
  Description of Artificial Sequence: Synthetic peptide
NDTNRTETF

SEQ ID NO: 11933 - protein, 8 aa, Artificial Sequence
  Description of Artificial Sequence: Synthetic peptide
AELQAIHL

SEQ ID NO: 11934 - protein, 9 aa, Artificial Sequence
  Description of Artificial Sequence: Synthetic peptide
QDPVPKQPL

SEQ ID NO: 11935 - protein, 8 aa, Artificial Sequence
  Description of Artificial Sequence: Synthetic peptide
SDFNIPAV

SEQ ID NO: 11936 - protein, 8 aa, Artificial Sequence
  Description of Artificial Sequence: Synthetic peptide
SDLLAITI

SEQ ID NO: 11937 - protein, 8 aa, Artificial Sequence
  Description of Artificial Sequence: Synthetic peptide
TDIQTREL

SEQ ID NO: 11938 - protein, 8 aa, Artificial Sequence
  Description of Artificial Sequence: Synthetic peptide
AELQAIQL

SEQ ID NO: 11939 - protein, 8 aa, Artificial Sequence
  Description of Artificial Sequence: Synthetic peptide
ADQLIHIY

SEQ ID NO: 11940 - protein, 8 aa, Artificial Sequence
  Description of Artificial Sequence: Synthetic peptide
ADNLWVTV

SEQ ID NO: 11941 - protein, 8 aa, Artificial Sequence
  Description of Artificial Sequence: Synthetic peptide
SEELKSLF

SEQ ID NO: 11942 - protein, 8 aa, Artificial Sequence
  Description of Artificial Sequence: Synthetic peptide
KEATTTLF

SEQ ID NO: 11943 - protein, 9 aa, Artificial Sequence
  Description of Artificial Sequence: Synthetic peptide
TEAVQKIAL

SEQ ID NO: 11944 - protein, 8 aa, Artificial Sequence
  Description of Artificial Sequence: Synthetic peptide
AEHLKTAV

SEQ ID NO: 11945 - protein, 9 aa, Artificial Sequence
  Description of Artificial Sequence: Synthetic peptide
VHLNESVQI

SEQ ID NO: 11946 - protein, 9 aa, Artificial Sequence
  Description of Artificial Sequence: Synthetic peptide
IHTDNGTNF

SEQ ID NO: 11947 - protein, 9 aa, Artificial Sequence
  Description of Artificial Sequence: Synthetic peptide
SHFPNNTAI

SEQ ID NO: 11948 - protein, 9 aa, Artificial Sequence
  Description of Artificial Sequence: Synthetic peptide
IQDNSEIKI

SEQ ID NO: 11949 - protein, 9 aa, Artificial Sequence
  Description of Artificial Sequence: Synthetic peptide
IHLGPGQTF

SEQ ID NO: 11950 - protein, 10 aa, Artificial Sequence
  Description of Artificial Sequence: Synthetic peptide
HQDPVPKQPL

SEQ ID NO: 11951 - protein, 9 aa, Artificial Sequence
  Description of Artificial Sequence: Synthetic peptide
FISGDINNL

SEQ ID NO: 11952 - protein, 9 aa, Artificial Sequence
  Description of Artificial Sequence: Synthetic peptide
SHDEIWNNM

SEQ ID NO: 11953 - protein, 9 aa, Artificial Sequence
  Description of Artificial Sequence: Synthetic peptide
IHLGPGQAF

SEQ ID NO: 11954 - protein, 10 aa, Artificial Sequence
  Description of Artificial Sequence: Synthetic peptide
VHIPLEEVKL

SEQ ID NO: 11955 - protein, 10 aa, Artificial Sequence
  Description of Artificial Sequence: Synthetic peptide
VHIPLETAEL

SEQ ID NO: 11956 - protein, 10 aa, Artificial Sequence
  Description of Artificial Sequence: Synthetic peptide
AHCNVSGTQW

SEQ ID NO: 11957 - protein, 9 aa, Artificial Sequence
  Description of Artificial Sequence: Synthetic peptide
AHTNDIKEL

SEQ ID NO: 11958 - protein, 10 aa, Artificial Sequence
  Description of Artificial Sequence: Synthetic peptide
VHIPLEEAEL

SEQ ID NO: 11959 - protein, 10 aa, Artificial Sequence
  Description of Artificial Sequence: Synthetic peptide
VHIPLEEAKL

SEQ ID NO: 11960 - protein, 9 aa, Artificial Sequence
  Description of Artificial Sequence: Synthetic peptide
TLSDQSSTL

SEQ ID NO: 11961 - protein, 9 aa, Artificial Sequence
  Description of Artificial Sequence: Synthetic peptide
IRIGPGQSF

SEQ ID NO: 11962 - protein, 11 aa, Artificial Sequence
  Description of Artificial Sequence: Synthetic peptide
TQIDPDLADQL

SEQ ID NO: 11963 - protein, 11 aa, Artificial Sequence
  Description of Artificial Sequence: Synthetic peptide
TQIDPGLADQL

SEQ ID NO: 11964 - protein, 9 aa, Artificial Sequence
  Description of Artificial Sequence: Synthetic peptide
THLEGKIIL

SEQ ID NO: 11965 - protein, 9 aa, Artificial Sequence
  Description of Artificial Sequence: Synthetic peptide
IHTDNGSNF

SEQ ID NO: 11966 - protein, 9 aa, Artificial Sequence
  Description of Artificial Sequence: Synthetic peptide
THLEGKVIL

SEQ ID NO: 11967 - protein, 9 aa, Artificial Sequence
  Description of Artificial Sequence: Synthetic peptide
AHTNDVKQL

SEQ ID NO: 11968 - protein, 9 aa, Artificial Sequence
  Description of Artificial Sequence: Synthetic peptide
TQDFWEVQL

SEQ ID NO: 11969 - protein, 9 aa, Artificial Sequence
  Description of Artificial Sequence: Synthetic peptide
GHQAAMQML

SEQ ID NO: 11970 - protein, 9 aa, Artificial Sequence
  Description of Artificial Sequence: Synthetic peptide
EHLKTAVQM

SEQ ID NO: 11971 - protein, 9 aa, Artificial Sequence
  Description of Artificial Sequence: Synthetic peptide
SHFPNNTAI

SEQ ID NO: 11972 - protein, 9 aa, Artificial Sequence
  Description of Artificial Sequence: Synthetic peptide
SQANTTIMM

SEQ ID NO: 11973 - protein, 9 aa, Artificial Sequence
  Description of Artificial Sequence: Synthetic peptide
IHTDNGTNF

SEQ ID NO: 11974 - protein, 9 aa, Artificial Sequence
  Description of Artificial Sequence: Synthetic peptide
YRTQIDPDL

SEQ ID NO: 11975 - protein, 9 aa, Artificial Sequence
  Description of Artificial Sequence: Synthetic peptide
FISGDINNL

SEQ ID NO: 11976 - protein, 9 aa, Artificial Sequence
  Description of Artificial Sequence: Synthetic peptide
TLSDQSSTL

SEQ ID NO: 11977 - protein, 9 aa, Artificial Sequence
  Description of Artificial Sequence: Synthetic peptide
YRTQIDPGL

SEQ ID NO: 11978 - protein, 10 aa, Artificial Sequence
  Description of Artificial Sequence: Synthetic peptide
HQDPVPKQPL

SEQ ID NO: 11979 - protein, 9 aa, Artificial Sequence
  Description of Artificial Sequence: Synthetic peptide
SQATNTAIM

SEQ ID NO: 11980 - protein, 9 aa, Artificial Sequence
  Description of Artificial Sequence: Synthetic peptide
GQYPPLASL

SEQ ID NO: 11981 - protein, 9 aa, Artificial Sequence
  Description of Artificial Sequence: Synthetic peptide
SQANSAIMM

SEQ ID NO: 11982 - protein, 9 aa, Artificial Sequence
  Description of Artificial Sequence: Synthetic peptide
VHLNESVQI

SEQ ID NO: 11983 - protein, 8 aa, Artificial Sequence
  Description of Artificial Sequence: Synthetic peptide
TRANNPDL

SEQ ID NO: 11984 - protein, 9 aa, Artificial Sequence
  Description of Artificial Sequence: Synthetic peptide
FLSAAGSTM

SEQ ID NO: 11985 - protein, 11 aa, Artificial Sequence
  Description of Artificial Sequence: Synthetic peptide
TQIDPDLADQL

SEQ ID NO: 11986 - protein, 9 aa, Artificial Sequence
  Description of Artificial Sequence: Synthetic peptide
IRIGPGQSF

SEQ ID NO: 11987 - protein, 8 aa, Artificial Sequence
  Description of Artificial Sequence: Synthetic peptide
MHTDIISL

SEQ ID NO: 11988 - protein, 11 aa, Artificial Sequence
  Description of Artificial Sequence: Synthetic peptide
TQIDPGLADQL

SEQ ID NO: 11989 - protein, 9 aa, Artificial Sequence
  Description of Artificial Sequence: Synthetic peptide
IHTDNGSNF

SEQ ID NO: 11990 - protein, 9 aa, Artificial Sequence
  Description of Artificial Sequence: Synthetic peptide
THLEGKVIL

SEQ ID NO: 11991 - protein, 9 aa, Artificial Sequence
  Description of Artificial Sequence: Synthetic peptide
HQAISPRTL

SEQ ID NO: 11992 - protein, 9 aa, Artificial Sequence
  Description of Artificial Sequence: Synthetic peptide
EHLKTAVQM

SEQ ID NO: 11993 - protein, 9 aa, Artificial Sequence
  Description of Artificial Sequence: Synthetic peptide
MRRPPPAAA

SEQ ID NO: 11994 - protein, 8 aa, Artificial Sequence
  Description of Artificial Sequence: Synthetic peptide
SHFPNNTA

SEQ ID NO: 11995 - protein, 9 aa, Artificial Sequence
  Description of Artificial Sequence: Synthetic peptide
EQVDRLVSA

SEQ ID NO: 11996 - protein, 9 aa, Artificial Sequence
  Description of Artificial Sequence: Synthetic peptide
ERMRQTPTA

SEQ ID NO: 11997 - protein, 9 aa, Artificial Sequence
  Description of Artificial Sequence: Synthetic peptide
SHFPNNTAI

SEQ ID NO: 11998 - protein, 8 aa, Artificial Sequence
  Description of Artificial Sequence: Synthetic peptide
DHILIEIC

SEQ ID NO: 11999 - protein, 8 aa, Artificial Sequence
  Description of Artificial Sequence: Synthetic peptide
VHIPLETA

SEQ ID NO: 12000 - protein, 8 aa, Artificial Sequence
  Description of Artificial Sequence: Synthetic peptide
VHIPLEEA

SEQ ID NO: 12001 - protein, 8 aa, Artificial Sequence
  Description of Artificial Sequence: Synthetic peptide
VHIPLEEV

SEQ ID NO: 12002 - protein, 9 aa, Artificial Sequence
  Description of Artificial Sequence: Synthetic peptide
DMVPLTAEA

SEQ ID NO: 12003 - protein, 8 aa, Artificial Sequence
  Description of Artificial Sequence: Synthetic peptide
MRRPPPAA

SEQ ID NO: 12004 - protein, 8 aa, Artificial Sequence
  Description of Artificial Sequence: Synthetic peptide
TDIVPLTA

SEQ ID NO: 12005 - protein, 9 aa, Artificial Sequence
  Description of Artificial Sequence: Synthetic peptide
RRTPPTPPA

SEQ ID NO: 12006 - protein, 8 aa, Artificial Sequence
  Description of Artificial Sequence: Synthetic peptide
DQITIDIC

SEQ ID NO: 12007 - protein, 9 aa, Artificial Sequence
  Description of Artificial Sequence: Synthetic peptide
NLLAIGIAA

SEQ ID NO: 12008 - protein, 8 aa, Artificial Sequence
  Description of Artificial Sequence: Synthetic peptide
HHTVLESG

SEQ ID NO: 12009 - protein, 10 aa, Artificial Sequence
  Description of Artificial Sequence: Synthetic peptide
SQYVLGIIQA

SEQ ID NO: 12010 - protein, 8 aa, Artificial Sequence
  Description of Artificial Sequence: Synthetic peptide
MHTDIISL

SEQ ID NO: 12011 - protein, 9 aa, Artificial Sequence
  Description of Artificial Sequence: Synthetic peptide
YQLETEPIA

SEQ ID NO: 12012 - protein, 9 aa, Artificial Sequence
  Description of Artificial Sequence: Synthetic peptide
EQVDKLVSA

SEQ ID NO: 12013 - protein, 8 aa, Artificial Sequence
  Description of Artificial Sequence: Synthetic peptide
TAFTIPSV

SEQ ID NO: 12014 - protein, 8 aa, Artificial Sequence
  Description of Artificial Sequence: Synthetic peptide
QHMLQLTV

SEQ ID NO: 12015 - protein, 9 aa, Artificial Sequence
  Description of Artificial Sequence: Synthetic peptide
QQHLLQLTV

SEQ ID NO: 12016 - protein, 8 aa, Artificial Sequence
  Description of Artificial Sequence: Synthetic peptide
THGIRPVV

SEQ ID NO: 12017 - protein, 8 aa, Artificial Sequence
  Description of Artificial Sequence: Synthetic peptide
GKVILVAV

SEQ ID NO: 12018 - protein, 8 aa, Artificial Sequence
  Description of Artificial Sequence: Synthetic peptide
THGIKPVV

SEQ ID NO: 12019 - protein, 10 aa, Artificial Sequence
  Description of Artificial Sequence: Synthetic peptide
SQYALGIIQA

SEQ ID NO: 12020 - protein, 9 aa, Artificial Sequence
  Description of Artificial Sequence: Synthetic peptide
VQLGIPHPA

SEQ ID NO: 12021 - protein, 9 aa, Artificial Sequence
  Description of Artificial Sequence: Synthetic peptide
TEAVQKISL

SEQ ID NO: 12022 - protein, 9 aa, Artificial Sequence
  Description of Artificial Sequence: Synthetic peptide
SEEPVPLQL

SEQ ID NO: 12023 - protein, 10 aa, Artificial Sequence
  Description of Artificial Sequence: Synthetic peptide
TETTNQKAEL

SEQ ID NO: 12024 - protein, 9 aa, Artificial Sequence
  Description of Artificial Sequence: Synthetic peptide
MEDEDKEVL

SEQ ID NO: 12025 - protein, 10 aa, Artificial Sequence
  Description of Artificial Sequence: Synthetic peptide
VEVKDTKEAL

SEQ ID NO: 12026 - protein, 9 aa, Artificial Sequence
  Description of Artificial Sequence: Synthetic peptide
SEGATPTDL

SEQ ID NO: 12027 - protein, 10 aa, Artificial Sequence
  Description of Artificial Sequence: Synthetic peptide
AEEGVGSSQI

SEQ ID NO: 12028 - protein, 9 aa, Artificial Sequence
  Description of Artificial Sequence: Synthetic peptide
LEEPVPLQL

SEQ ID NO: 12029 - protein, 10 aa, Artificial Sequence
  Description of Artificial Sequence: Synthetic peptide
GELYPPLASL

SEQ ID NO: 12030 - protein, 9 aa, Artificial Sequence
  Description of Artificial Sequence: Synthetic peptide
SEYIEAEVI

SEQ ID NO: 12031 - protein, 10 aa, Artificial Sequence
  Description of Artificial Sequence: Synthetic peptide
TEEGVGSPQI

SEQ ID NO: 12032 - protein, 9 aa, Artificial Sequence
  Description of Artificial Sequence: Synthetic peptide
KEEGQYPPL

SEQ ID NO: 12033 - protein, 8 aa, Artificial Sequence
  Description of Artificial Sequence: Synthetic peptide
AELQAIHL

SEQ ID NO: 12034 - protein, 10 aa, Artificial Sequence
  Description of Artificial Sequence: Synthetic peptide
KELTDAVQKV

SEQ ID NO: 12035 - protein, 10 aa, Artificial Sequence
  Description of Artificial Sequence: Synthetic peptide
KEINNYSNTI

SEQ ID NO: 12036 - protein, 11 aa, Artificial Sequence
  Description of Artificial Sequence: Synthetic peptide
AEGTDRIIEVL

SEQ ID NO: 12037 - protein, 9 aa, Artificial Sequence
  Description of Artificial Sequence: Synthetic peptide
SESEIVNKI

SEQ ID NO: 12038 - protein, 11 aa, Artificial Sequence
  Description of Artificial Sequence: Synthetic peptide
SEGDAEELAAL

SEQ ID NO: 12039 - protein, 11 aa, Artificial Sequence
  Description of Artificial Sequence: Synthetic peptide
AEGTDRVIEAL

SEQ ID NO: 12040 - protein, 11 aa, Artificial Sequence
  Description of Artificial Sequence: Synthetic peptide
AEGTDRVIEVL

SEQ ID NO: 12041 - protein, 9 aa, Artificial Sequence
  Description of Artificial Sequence: Synthetic peptide
MEDEDREVL

SEQ ID NO: 12042 - protein, 8 aa, Artificial Sequence
  Description of Artificial Sequence: Synthetic peptide
AELQAIQL

SEQ ID NO: 12043 - protein, 10 aa, Artificial Sequence
  Description of Artificial Sequence: Synthetic peptide
IEAQQHMLQL

SEQ ID NO: 12044 - protein, 9 aa, Artificial Sequence
  Description of Artificial Sequence: Synthetic peptide
WENDMVEQM

SEQ ID NO: 12045 - protein, 10 aa, Artificial Sequence
  Description of Artificial Sequence: Synthetic peptide
QELKNSAISL

SEQ ID NO: 12046 - protein, 8 aa, Artificial Sequence
  Description of Artificial Sequence: Synthetic peptide
IEAQQHML

SEQ ID NO: 12047 - protein, 10 aa, Artificial Sequence
  Description of Artificial Sequence: Synthetic peptide
IEIKDTKEAL

SEQ ID NO: 12048 - protein, 9 aa, Artificial Sequence
  Description of Artificial Sequence: Synthetic peptide
QEKNEQELL

SEQ ID NO: 12049 - protein, 9 aa, Artificial Sequence
  Description of Artificial Sequence: Synthetic peptide
TEAVQKIAL

SEQ ID NO: 12050 - protein, 11 aa, Artificial Sequence
  Description of Artificial Sequence: Synthetic peptide
SEIVNQIIEQL

SEQ ID NO: 12051 - protein, 9 aa, Artificial Sequence
  Description of Artificial Sequence: Synthetic peptide
SESEIVNQI

SEQ ID NO: 12052 - protein, 10 aa, Artificial Sequence
  Description of Artificial Sequence: Synthetic peptide
IEAQQHLLQL

SEQ ID NO: 12053 - protein, 10 aa, Artificial Sequence
  Description of Artificial Sequence: Synthetic peptide
IEVKDTKEAL

SEQ ID NO: 12054 - protein, 9 aa, Artificial Sequence
  Description of Artificial Sequence: Synthetic peptide
SEGATPQDL

SEQ ID NO: 12055 - protein, 8 aa, Artificial Sequence
  Description of Artificial Sequence: Synthetic peptide
IETVPVKL

SEQ ID NO: 12056 - protein, 10 aa, Artificial Sequence
  Description of Artificial Sequence: Synthetic peptide
AEHLKTAVQM

SEQ ID NO: 12057 - protein, 8 aa, Artificial Sequence
  Description of Artificial Sequence: Synthetic peptide
IEAQQHLL

SEQ ID NO: 12058 - protein, 9 aa, Artificial Sequence
  Description of Artificial Sequence: Synthetic peptide
TEAVQKISL

SEQ ID NO: 12059 - protein, 8 aa, Artificial Sequence
  Description of Artificial Sequence: Synthetic peptide
SDFNIPAV

SEQ ID NO: 12060 - protein, 10 aa, Artificial Sequence
  Description of Artificial Sequence: Synthetic peptide
GELYPPLASL

SEQ ID NO: 12061 - protein, 11 aa, Artificial Sequence
  Description of Artificial Sequence: Synthetic peptide
AEGTDRVIEAL

SEQ ID NO: 12062 - protein, 10 aa, Artificial Sequence
  Description of Artificial Sequence: Synthetic peptide
TETTNQKAEL

SEQ ID NO: 12063 - protein, 11 aa, Artificial Sequence
  Description of Artificial Sequence: Synthetic peptide
AEGTDRIIEVL

SEQ ID NO: 12064 - protein, 8 aa, Artificial Sequence
  Description of Artificial Sequence: Synthetic peptide
AELQAIHL

SEQ ID NO: 12065 - protein, 10 aa, Artificial Sequence
  Description of Artificial Sequence: Synthetic peptide
GEIVIRSQNI

SEQ ID NO: 12066 - protein, 10 aa, Artificial Sequence
  Description of Artificial Sequence: Synthetic peptide
VEVKDTKEAL

SEQ ID NO: 12067 - protein, 10 aa, Artificial Sequence
  Description of Artificial Sequence: Synthetic peptide
KELTDAVQKV

SEQ ID NO: 12068 - protein, 9 aa, Artificial Sequence
  Description of Artificial Sequence: Synthetic peptide
SEEPVPLQL

SEQ ID NO: 12069 - protein, 9 aa, Artificial Sequence
  Description of Artificial Sequence: Synthetic peptide
NEGVGNPQI

SEQ ID NO: 12070 - protein, 9 aa, Artificial Sequence
  Description of Artificial Sequence: Synthetic peptide
SESEIVNKI

SEQ ID NO: 12071 - protein, 8 aa, Artificial Sequence
  Description of Artificial Sequence: Synthetic peptide
TDRVIEAL

SEQ ID NO: 12072 - protein, 9 aa, Artificial Sequence
  Description of Artificial Sequence: Synthetic peptide
SEGATPTDL

SEQ ID NO: 12073 - protein, 9 aa, Artificial Sequence
  Description of Artificial Sequence: Synthetic peptide
SDFNIPAVV

SEQ ID NO: 12074 - protein, 9 aa, Artificial Sequence
  Description of Artificial Sequence: Synthetic peptide
SEYIEAEVI

SEQ ID NO: 12075 - protein, 11 aa, Artificial Sequence
  Description of Artificial Sequence: Synthetic peptide
SEIVNKIIEKL

SEQ ID NO: 12076 - protein, 8 aa, Artificial Sequence
  Description of Artificial Sequence: Synthetic peptide
DEWEKIQL

SEQ ID NO: 12077 - protein, 8 aa, Artificial Sequence
  Description of Artificial Sequence: Synthetic peptide
TAFTIPSL

SEQ ID NO: 12078 - protein, 8 aa, Artificial Sequence
  Description of Artificial Sequence: Synthetic peptide
LEYVKAEL

SEQ ID NO: 12079 - protein, 9 aa, Artificial Sequence
  Description of Artificial Sequence: Synthetic peptide
GQYPPLASL

SEQ ID NO: 12080 - protein, 10 aa, Artificial Sequence
  Description of Artificial Sequence: Synthetic peptide
KEINNYSNTI

SEQ ID NO: 12081 - protein, 11 aa, Artificial Sequence
  Description of Artificial Sequence: Synthetic peptide
AEAMSQANTTI

SEQ ID NO: 12082 - protein, 9 aa, Artificial Sequence
  Description of Artificial Sequence: Synthetic peptide
MEDEDKEVL

SEQ ID NO: 12083 - protein, 8 aa, Artificial Sequence
  Description of Artificial Sequence: Synthetic peptide
AELQAIYL

SEQ ID NO: 12084 - protein, 9 aa, Artificial Sequence
  Description of Artificial Sequence: Synthetic peptide
LETEPIVGA

SEQ ID NO: 12085 - protein, 11 aa, Artificial Sequence
  Description of Artificial Sequence: Synthetic peptide
AEAMSQATNTA

SEQ ID NO: 12086 - protein, 8 aa, Artificial Sequence
  Description of Artificial Sequence: Synthetic peptide
TDIQTREL

SEQ ID NO: 12087 - protein, 10 aa, Artificial Sequence
  Description of Artificial Sequence: Synthetic peptide
GEIIGDIRKA

SEQ ID NO: 12088 - protein, 11 aa, Artificial Sequence
  Description of Artificial Sequence: Synthetic peptide
AEGTDRVIEVL

SEQ ID NO: 12089 - protein, 8 aa, Artificial Sequence
  Description of Artificial Sequence: Synthetic peptide
TDRVIEVL

SEQ ID NO: 12090 - protein, 8 aa, Artificial Sequence
  Description of Artificial Sequence: Synthetic peptide
AELQAIQL

SEQ ID NO: 12091 - protein, 10 aa, Artificial Sequence
  Description of Artificial Sequence: Synthetic peptide
IEAQQHMLQL

SEQ ID NO: 12092 - protein, 9 aa, Artificial Sequence
  Description of Artificial Sequence: Synthetic peptide
WENDMVEQM

SEQ ID NO: 12093 - protein, 9 aa, Artificial Sequence
  Description of Artificial Sequence: Synthetic peptide
MEDEDREVL

SEQ ID NO: 12094 - protein, 10 aa, Artificial Sequence
  Description of Artificial Sequence: Synthetic peptide
AELQAIQLAL

SEQ ID NO: 12095 - protein, 10 aa, Artificial Sequence
  Description of Artificial Sequence: Synthetic peptide
QELKNSAISL

SEQ ID NO: 12096 - protein, 8 aa, Artificial Sequence
  Description of Artificial Sequence: Synthetic peptide
IEAQQHML

SEQ ID NO: 12097 - protein, 10 aa, Artificial Sequence
  Description of Artificial Sequence: Synthetic peptide
IEIKDTKEAL

SEQ ID NO: 12098 - protein, 9 aa, Artificial Sequence
  Description of Artificial Sequence: Synthetic peptide
TEAVQKIAL

SEQ ID NO: 12099 - protein, 11 aa, Artificial Sequence
  Description of Artificial Sequence: Synthetic peptide
SEIVNQIIEQL

SEQ ID NO: 12100 - protein, 9 aa, Artificial Sequence
  Description of Artificial Sequence: Synthetic peptide
SESEIVNQI

SEQ ID NO: 12101 - protein, 10 aa, Artificial Sequence
  Description of Artificial Sequence: Synthetic peptide
IEAQQHLLQL

SEQ ID NO: 12102 - protein, 9 aa, Artificial Sequence
  Description of Artificial Sequence: Synthetic peptide
SDFNLPPVV

SEQ ID NO: 12103 - protein, 11 aa, Artificial Sequence
  Description of Artificial Sequence: Synthetic peptide
SELVNQIIEQL

SEQ ID NO: 12104 - protein, 10 aa, Artificial Sequence
  Description of Artificial Sequence: Synthetic peptide
IEVKDTKEAL

SEQ ID NO: 12105 - protein, 8 aa, Artificial Sequence
  Description of Artificial Sequence: Synthetic peptide
TDIQTKEL

SEQ ID NO: 12106 - protein, 10 aa, Artificial Sequence
  Description of Artificial Sequence: Synthetic peptide
AEHLKTAVQM

SEQ ID NO: 12107 - protein, 8 aa, Artificial Sequence
  Description of Artificial Sequence: Synthetic peptide
IETVPVKL

SEQ ID NO: 12108 - protein, 8 aa, Artificial Sequence
  Description of Artificial Sequence: Synthetic peptide
IEAQQHLL

SEQ ID NO: 12109 - protein, 9 aa, Artificial Sequence
  Description of Artificial Sequence: Synthetic peptide
SEGATPQDL

SEQ ID NO: 12110 - protein, 9 aa, Artificial Sequence
  Description of Artificial Sequence: Synthetic peptide
SESELVNQI

SEQ ID NO: 12111 - protein, 9 aa, Artificial Sequence
  Description of Artificial Sequence: Synthetic peptide
LETEPIVGA

SEQ ID NO: 12112 - protein, 9 aa, Artificial Sequence
  Description of Artificial Sequence: Synthetic peptide
LETEPIIGA

SEQ ID NO: 12113 - protein, 10 aa, Artificial Sequence
  Description of Artificial Sequence: Synthetic peptide
VEIEPLGVAP

SEQ ID NO: 12114 - protein, 9 aa, Artificial Sequence
  Description of Artificial Sequence: Synthetic peptide
AELQAIHLA

SEQ ID NO: 12115 - protein, 11 aa, Artificial Sequence
  Description of Artificial Sequence: Synthetic peptide
AEWDRLHPTQA

SEQ ID NO: 12116 - protein, 10 aa, Artificial Sequence
  Description of Artificial Sequence: Synthetic peptide
SEVHIPLETA

SEQ ID NO: 12117 - protein, 9 aa, Artificial Sequence
  Description of Artificial Sequence: Synthetic peptide
AEWDRLHPA

SEQ ID NO: 12118 - protein, 8 aa, Artificial Sequence
  Description of Artificial Sequence: Synthetic peptide
SDFNIPAV

SEQ ID NO: 12119 - protein, 11 aa, Artificial Sequence
  Description of Artificial Sequence: Synthetic peptide
AEAMSQATNAA

SEQ ID NO: 12120 - protein, 9 aa, Artificial Sequence
  Description of Artificial Sequence: Synthetic peptide
VEIEPLGVA

SEQ ID NO: 12121 - protein, 10 aa, Artificial Sequence
  Description of Artificial Sequence: Synthetic peptide
SDFNIPAVVA

SEQ ID NO: 12122 - protein, 10 aa, Artificial Sequence
  Description of Artificial Sequence: Synthetic peptide
AEWTDRVIEA

SEQ ID NO: 12123 - protein, 11 aa, Artificial Sequence
  Description of Artificial Sequence: Synthetic peptide
KELTDAVQKVA

SEQ ID NO: 12124 - protein, 11 aa, Artificial Sequence
  Description of Artificial Sequence: Synthetic peptide
AEAMSQATNTA

SEQ ID NO: 12125 - protein, 9 aa, Artificial Sequence
  Description of Artificial Sequence: Synthetic peptide
VEVKDTKEA

SEQ ID NO: 12126 - protein, 10 aa, Artificial Sequence
  Description of Artificial Sequence: Synthetic peptide
SEVHIPLEEA

SEQ ID NO: 12127 - protein, 10 aa, Artificial Sequence
  Description of Artificial Sequence: Synthetic peptide
GEIIGDIRKA

SEQ ID NO: 12128 - protein, 8 aa, Artificial Sequence
  Description of Artificial Sequence: Synthetic peptide
RDFILIAA

SEQ ID NO: 12129 - protein, 9 aa, Artificial Sequence
  Description of Artificial Sequence: Synthetic peptide
LETEPIAGA

SEQ ID NO: 12130 - protein, 9 aa, Artificial Sequence
  Description of Artificial Sequence: Synthetic peptide
AELQAIQLA

SEQ ID NO: 12131 - protein, 9 aa, Artificial Sequence
  Description of Artificial Sequence: Synthetic peptide
IEIKDTKEA

SEQ ID NO: 12132 - protein, 8 aa, Artificial Sequence
  Description of Artificial Sequence: Synthetic peptide
SESAIRKA

SEQ ID NO: 12133 - protein, 10 aa, Artificial Sequence
  Description of Artificial Sequence: Synthetic peptide
SDFNLPPVVA

SEQ ID NO: 12134 - protein, 9 aa, Artificial Sequence
  Description of Artificial Sequence: Synthetic peptide
IEVKDTKEA

SEQ ID NO: 12135 - protein, 9 aa, Artificial Sequence
  Description of Artificial Sequence: Synthetic peptide
EEVGFPVRP

SEQ ID NO: 12136 - protein, 9 aa, Artificial Sequence
  Description of Artificial Sequence: Synthetic peptide
QEFGIPYNP

SEQ ID NO: 12137 - protein, 9 aa, Artificial Sequence
  Description of Artificial Sequence: Synthetic peptide
TEAVQKISL

SEQ ID NO: 12138 - protein, 8 aa, Artificial Sequence
  Description of Artificial Sequence: Synthetic peptide
TDRVIEAL

SEQ ID NO: 12139 - protein, 8 aa, Artificial Sequence
  Description of Artificial Sequence: Synthetic peptide
AELQAIHL

SEQ ID NO: 12140 - protein, 9 aa, Artificial Sequence
  Description of Artificial Sequence: Synthetic peptide
GEQDRNRSV

SEQ ID NO: 12141 - protein, 9 aa, Artificial Sequence
  Description of Artificial Sequence: Synthetic peptide
SERILSSCL

SEQ ID NO: 12142 - protein, 8 aa, Artificial Sequence
  Description of Artificial Sequence: Synthetic peptide
TDRIIEVL

SEQ ID NO: 12143 - protein, 9 aa, Artificial Sequence
  Description of Artificial Sequence: Synthetic peptide
QERNEQELL

SEQ ID NO: 12144 - protein, 9 aa, Artificial Sequence
  Description of Artificial Sequence: Synthetic peptide
SEEPVPLQL

SEQ ID NO: 12145 - protein, 9 aa, Artificial Sequence
  Description of Artificial Sequence: Synthetic peptide
MEDEDKEVL

SEQ ID NO: 12146 - protein, 9 aa, Artificial Sequence
  Description of Artificial Sequence: Synthetic peptide
SERILVACL

SEQ ID NO: 12147 - protein, 8 aa, Artificial Sequence
  Description of Artificial Sequence: Synthetic peptide
LEYVKAEL

SEQ ID NO: 12148 - protein, 10 aa, Artificial Sequence
  Description of Artificial Sequence: Synthetic peptide
GELYPPLASL

SEQ ID NO: 12149 - protein, 10 aa, Artificial Sequence
  Description of Artificial Sequence: Synthetic peptide
TETTNQKAEL

SEQ ID NO: 12150 - protein, 8 aa, Artificial Sequence
  Description of Artificial Sequence: Synthetic peptide
GQMVHQSL

SEQ ID NO: 12151 - protein, 8 aa, Artificial Sequence
  Description of Artificial Sequence: Synthetic peptide
DEWEKIQL

SEQ ID NO: 12152 - protein, 8 aa, Artificial Sequence
  Description of Artificial Sequence: Synthetic peptide
SDFNIPAV

SEQ ID NO: 12153 - protein, 8 aa, Artificial Sequence
  Description of Artificial Sequence: Synthetic peptide
SERILVAC

SEQ ID NO: 12154 - protein, 8 aa, Artificial Sequence
  Description of Artificial Sequence: Synthetic peptide
AELQAIYL

SEQ ID NO: 12155 - protein, 8 aa, Artificial Sequence
  Description of Artificial Sequence: Synthetic peptide
AELVITTY

SEQ ID NO: 12156 - protein, 9 aa, Artificial Sequence
  Description of Artificial Sequence: Synthetic peptide
SEGATPTDL

SEQ ID NO: 12157 - protein, 9 aa, Artificial Sequence
  Description of Artificial Sequence: Synthetic peptide
SEYIEAEVI

SEQ ID NO: 12158 - protein, 9 aa, Artificial Sequence
  Description of Artificial Sequence: Synthetic peptide
AEKGVSQNY

SEQ ID NO: 12159 - protein, 9 aa, Artificial Sequence
  Description of Artificial Sequence: Synthetic peptide
SESEIVNKI

SEQ ID NO: 12160 - protein, 8 aa, Artificial Sequence
  Description of Artificial Sequence: Synthetic peptide
TDIQTREL

SEQ ID NO: 12161 - protein, 8 aa, Artificial Sequence
  Description of Artificial Sequence: Synthetic peptide
TDRVIEVL

SEQ ID NO: 12162 - protein, 8 aa, Artificial Sequence
  Description of Artificial Sequence: Synthetic peptide
AELQAIQL

SEQ ID NO: 12163 - protein, 9 aa, Artificial Sequence
  Description of Artificial Sequence: Synthetic peptide
MEDEDREVL

SEQ ID NO: 12164 - protein, 10 aa, Artificial Sequence
  Description of Artificial Sequence: Synthetic peptide
QELKNSAISL

SEQ ID NO: 12165 - protein, 8 aa, Artificial Sequence
  Description of Artificial Sequence: Synthetic peptide
IEAQQHML

SEQ ID NO: 12166 - protein, 10 aa, Artificial Sequence
  Description of Artificial Sequence: Synthetic peptide
IEIKDTKEAL

SEQ ID NO: 12167 - protein, 9 aa, Artificial Sequence
  Description of Artificial Sequence: Synthetic peptide
SESAIRKAI

SEQ ID NO: 12168 - protein, 9 aa, Artificial Sequence
  Description of Artificial Sequence: Synthetic peptide
QEKNEQELL

SEQ ID NO: 12169 - protein, 9 aa, Artificial Sequence
  Description of Artificial Sequence: Synthetic peptide
TEAVQKIAL

SEQ ID NO: 12170 - protein, 9 aa, Artificial Sequence
  Description of Artificial Sequence: Synthetic peptide
KEKGGLEGL

SEQ ID NO: 12171 - protein, 8 aa, Artificial Sequence
  Description of Artificial Sequence: Synthetic peptide
TDIQTKEL

SEQ ID NO: 12172 - protein, 8 aa, Artificial Sequence
  Description of Artificial Sequence: Synthetic peptide
AEHLKTAV

SEQ ID NO: 12173 - protein, 8 aa, Artificial Sequence
  Description of Artificial Sequence: Synthetic peptide
IEAQQHLL

SEQ ID NO: 12174 - protein, 10 aa, Artificial Sequence
  Description of Artificial Sequence: Synthetic peptide
AEHLKTAVQM

SEQ ID NO: 12175 - protein, 8 aa, Artificial Sequence
  Description of Artificial Sequence: Synthetic peptide
TERQANFL

SEQ ID NO: 12176 - protein, 11 aa, Artificial Sequence
  Description of Artificial Sequence: Synthetic peptide
AEQASQDVKGW

SEQ ID NO: 12177 - protein, 9 aa, Artificial Sequence
  Description of Artificial Sequence: Synthetic peptide
AEKGVSQNY

SEQ ID NO: 12178 - protein, 9 aa, Artificial Sequence
  Description of Artificial Sequence: Synthetic peptide
AELVITTYW

SEQ ID NO: 12179 - protein, 10 aa, Artificial Sequence
  Description of Artificial Sequence: Synthetic peptide
EEVKLVITTY

SEQ ID NO: 12180 - protein, 9 aa, Artificial Sequence
  Description of Artificial Sequence: Synthetic peptide
EEIWGNMTW

SEQ ID NO: 12181 - protein, 10 aa, Artificial Sequence
  Description of Artificial Sequence: Synthetic peptide
EEAELVITTY

SEQ ID NO: 12182 - protein, 9 aa, Artificial Sequence
  Description of Artificial Sequence: Synthetic peptide
SESEIVNKI

SEQ ID NO: 12183 - protein, 10 aa, Artificial Sequence
  Description of Artificial Sequence: Synthetic peptide
EEAKLVVTTY

SEQ ID NO: 12184 - protein, 11 aa, Artificial Sequence
  Description of Artificial Sequence: Synthetic peptide
EEAELVITTYW

SEQ ID NO: 12185 - protein, 9 aa, Artificial Sequence
  Description of Artificial Sequence: Synthetic peptide
EEIWNNMTW

SEQ ID NO: 12186 - protein, 8 aa, Artificial Sequence
  Description of Artificial Sequence: Synthetic peptide
CEINGTQW

SEQ ID NO: 12187 - protein, 11 aa, Artificial Sequence
  Description of Artificial Sequence: Synthetic peptide
EESGAIQNCSF

SEQ ID NO: 12188 - protein, 11 aa, Artificial Sequence
  Description of Artificial Sequence: Synthetic peptide
AELQKQGQGQW

SEQ ID NO: 12189 - protein, 11 aa, Artificial Sequence
  Description of Artificial Sequence: Synthetic peptide
EEAKLVVTTYW

SEQ ID NO: 12190 - protein, 11 aa, Artificial Sequence
  Description of Artificial Sequence: Synthetic peptide
AEQATQEVKGW

SEQ ID NO: 12191 - protein, 9 aa, Artificial Sequence
  Description of Artificial Sequence: Synthetic peptide
QELLALDKW

SEQ ID NO: 12192 - protein, 11 aa, Artificial Sequence
  Description of Artificial Sequence: Synthetic peptide
NEQELLALDKW

SEQ ID NO: 12193 - protein, 10 aa, Artificial Sequence
  Description of Artificial Sequence: Synthetic peptide
NETPGVRYQY

SEQ ID NO: 12194 - protein, 11 aa, Artificial Sequence
  Description of Artificial Sequence: Synthetic peptide
AEQASQEVKNW

SEQ ID NO: 12195 - protein, 9 aa, Artificial Sequence
  Description of Artificial Sequence: Synthetic peptide
AENLWVTVY

SEQ ID NO: 12196 - protein, 11 aa, Artificial Sequence
  Description of Artificial Sequence: Synthetic peptide
AEIQKQGQGQW

SEQ ID NO: 12197 - protein, 9 aa, Artificial Sequence
  Description of Artificial Sequence: Synthetic peptide
SESAIRKAI

SEQ ID NO: 12198 - protein, 9 aa, Artificial Sequence
  Description of Artificial Sequence: Synthetic peptide
DEIWNNMTW

SEQ ID NO: 12199 - protein, 11 aa, Artificial Sequence
  Description of Artificial Sequence: Synthetic peptide
SEVNIVTDSQY

SEQ ID NO: 12200 - protein, 9 aa, Artificial Sequence
  Description of Artificial Sequence: Synthetic peptide
SESEIVNQI

SEQ ID NO: 12201 - protein, 10 aa, Artificial Sequence
  Description of Artificial Sequence: Synthetic peptide
NETPGIRYQY

SEQ ID NO: 12202 - protein, 9 aa, Artificial Sequence
  Description of Artificial Sequence: Synthetic peptide
AETGQETAY

SEQ ID NO: 12203 - protein, 11 aa, Artificial Sequence
  Description of Artificial Sequence: Synthetic peptide
AEQASQDVKGW

SEQ ID NO: 12204 - protein, 10 aa, Artificial Sequence
  Description of Artificial Sequence: Synthetic peptide
EEVKLVITTY

SEQ ID NO: 12205 - protein, 9 aa, Artificial Sequence
  Description of Artificial Sequence: Synthetic peptide
SESEIVNKI

SEQ ID NO: 12206 - protein, 10 aa, Artificial Sequence
  Description of Artificial Sequence: Synthetic peptide
EEAKLVVTTY

SEQ ID NO: 12207 - protein, 10 aa, Artificial Sequence
  Description of Artificial Sequence: Synthetic peptide
EEAELVITTY

SEQ ID NO: 12208 - protein, 9 aa, Artificial Sequence
  Description of Artificial Sequence: Synthetic peptide
AEKGVSQNY

SEQ ID NO: 12209 - protein, 9 aa, Artificial Sequence
  Description of Artificial Sequence: Synthetic peptide
EEIWGNMTW

SEQ ID NO: 12210 - protein, 9 aa, Artificial Sequence
  Description of Artificial Sequence: Synthetic peptide
AELVITTYW

SEQ ID NO: 12211 - protein, 11 aa, Artificial Sequence
  Description of Artificial Sequence: Synthetic peptide
EEAELVITTYW

SEQ ID NO: 12212 - protein, 11 aa, Artificial Sequence
  Description of Artificial Sequence: Synthetic peptide
AEIQKQGDGQW

SEQ ID NO: 12213 - protein, 11 aa, Artificial Sequence
  Description of Artificial Sequence: Synthetic peptide
AELQKQGQGQW

SEQ ID NO: 12214 - protein, 11 aa, Artificial Sequence
  Description of Artificial Sequence: Synthetic peptide
EEAKLVVTTYW

SEQ ID NO: 12215 - protein, 9 aa, Artificial Sequence
  Description of Artificial Sequence: Synthetic peptide
EEIWNNMTW

SEQ ID NO: 12216 - protein, 11 aa, Artificial Sequence
  Description of Artificial Sequence: Synthetic peptide
EEVKLVITTYW

SEQ ID NO: 12217 - protein, 10 aa, Artificial Sequence
  Description of Artificial Sequence: Synthetic peptide
MEWEKEVSNY

SEQ ID NO: 12218 - protein, 8 aa, Artificial Sequence
  Description of Artificial Sequence: Synthetic peptide
CEINGTQW

SEQ ID NO: 12219 - protein, 9 aa, Artificial Sequence
  Description of Artificial Sequence: Synthetic peptide
EEGVGSPQI

SEQ ID NO: 12220 - protein, 9 aa, Artificial Sequence
  Description of Artificial Sequence: Synthetic peptide
SEEPVPLQL

SEQ ID NO: 12221 - protein, 9 aa, Artificial Sequence
  Description of Artificial Sequence: Synthetic peptide
QELLKAVRY

SEQ ID NO: 12222 - protein, 10 aa, Artificial Sequence
  Description of Artificial Sequence: Synthetic peptide
MEWEKEISNY

SEQ ID NO: 12223 - protein, 8 aa, Artificial Sequence
  Description of Artificial Sequence: Synthetic peptide
AELVITTY

SEQ ID NO: 12224 - protein, 11 aa, Artificial Sequence
  Description of Artificial Sequence: Synthetic peptide
EESGAIQNCSF

SEQ ID NO: 12225 - protein, 10 aa, Artificial Sequence
  Description of Artificial Sequence: Synthetic peptide
TEPIIGAETF

SEQ ID NO: 12226 - protein, 9 aa, Artificial Sequence
  Description of Artificial Sequence: Synthetic peptide
TEAVQKISL

SEQ ID NO: 12227 - protein, 9 aa, Artificial Sequence
  Description of Artificial Sequence: Synthetic peptide
AEGEIVIRS

SEQ ID NO: 12228 - protein, 9 aa, Artificial Sequence
  Description of Artificial Sequence: Synthetic peptide
TELLKAVKY

SEQ ID NO: 12229 - protein, 11 aa, Artificial Sequence
  Description of Artificial Sequence: Synthetic peptide
MEDEDREVLRW

SEQ ID NO: 12230 - protein, 9 aa, Artificial Sequence
  Description of Artificial Sequence: Synthetic peptide
DEDREVLRW

SEQ ID NO: 12231 - protein, 9 aa, Artificial Sequence
  Description of Artificial Sequence: Synthetic peptide
DEDKEVLKW

SEQ ID NO: 12232 - protein, 10 aa, Artificial Sequence
  Description of Artificial Sequence: Synthetic peptide
AETGQDTAYF

SEQ ID NO: 12233 - protein, 11 aa, Artificial Sequence
  Description of Artificial Sequence: Synthetic peptide
AEQATQEVKGW

SEQ ID NO: 12234 - protein, 9 aa, Artificial Sequence
  Description of Artificial Sequence: Synthetic peptide
QELLALDKW

SEQ ID NO: 12235 - protein, 11 aa, Artificial Sequence
  Description of Artificial Sequence: Synthetic peptide
NEQELLALDKW

SEQ ID NO: 12236 - protein, 10 aa, Artificial Sequence
  Description of Artificial Sequence: Synthetic peptide
NETPGVRYQY

SEQ ID NO: 12237 - protein, 8 aa, Artificial Sequence
  Description of Artificial Sequence: Synthetic peptide
NETPGVRY

SEQ ID NO: 12238 - protein, 11 aa, Artificial Sequence
  Description of Artificial Sequence: Synthetic peptide
AEQASQEVKNW

SEQ ID NO: 12239 - protein, 9 aa, Artificial Sequence
  Description of Artificial Sequence: Synthetic peptide
QELLELDKW

SEQ ID NO: 12240 - protein, 9 aa, Artificial Sequence
  Description of Artificial Sequence: Synthetic peptide
DEDREVLKW

SEQ ID NO: 12241 - protein, 11 aa, Artificial Sequence
  Description of Artificial Sequence: Synthetic peptide
MEDEDREVLKW

SEQ ID NO: 12242 - protein, 9 aa, Artificial Sequence
  Description of Artificial Sequence: Synthetic peptide
YEKEVHNVW

SEQ ID NO: 12243 - protein, 9 aa, Artificial Sequence
  Description of Artificial Sequence: Synthetic peptide
AENLWVTVY

SEQ ID NO: 12244 - protein, 11 aa, Artificial Sequence
  Description of Artificial Sequence: Synthetic peptide
AEIQKQGQGQW

SEQ ID NO: 12245 - protein, 9 aa, Artificial Sequence
  Description of Artificial Sequence: Synthetic peptide
SESAIRKAI

SEQ ID NO: 12246 - protein, 9 aa, Artificial Sequence
  Description of Artificial Sequence: Synthetic peptide
DEIWNNMTW

SEQ ID NO: 12247 - protein, 11 aa, Artificial Sequence
  Description of Artificial Sequence: Synthetic peptide
SEVNIVTDSQY

SEQ ID NO: 12248 - protein, 9 aa, Artificial Sequence
  Description of Artificial Sequence: Synthetic peptide
SESEIVNQI

SEQ ID NO: 12249 - protein, 10 aa, Artificial Sequence
  Description of Artificial Sequence: Synthetic peptide
EEHEKYHNNW

SEQ ID NO: 12250 - protein, 10 aa, Artificial Sequence
  Description of Artificial Sequence: Synthetic peptide
NETPGIRYQY

SEQ ID NO: 12251 - protein, 9 aa, Artificial Sequence
  Description of Artificial Sequence: Synthetic peptide
SESELVNQI

SEQ ID NO: 12252 - protein, 9 aa, Artificial Sequence
  Description of Artificial Sequence: Synthetic peptide
AETGQETAY

SEQ ID NO: 12253 - protein, 10 aa, Artificial Sequence
  Description of Artificial Sequence: Synthetic peptide
AETGQETAYF

SEQ ID NO: 12254 - protein, 8 aa, Artificial Sequence
  Description of Artificial Sequence: Synthetic peptide
NETPGIRY

SEQ ID NO: 12255 - protein, 11 aa, Artificial Sequence
  Description of Artificial Sequence: Synthetic peptide
EESGAIQNCSF

SEQ ID NO: 12256 - protein, 11 aa, Artificial Sequence
  Description of Artificial Sequence: Synthetic peptide
AEQASQDVKGW

SEQ ID NO: 12257 - protein, 9 aa, Artificial Sequence
  Description of Artificial Sequence: Synthetic peptide
TEAVQKISL

SEQ ID NO: 12258 - protein, 9 aa, Artificial Sequence
  Description of Artificial Sequence: Synthetic peptide
SESEIVNKI

SEQ ID NO: 12259 - protein, 10 aa, Artificial Sequence
  Description of Artificial Sequence: Synthetic peptide
AEEGVGSSQI

SEQ ID NO: 12260 - protein, 11 aa, Artificial Sequence
  Description of Artificial Sequence: Synthetic peptide
EEPGAIQNCSF

SEQ ID NO: 12261 - protein, 10 aa, Artificial Sequence
  Description of Artificial Sequence: Synthetic peptide
GEIVIRSQNI

SEQ ID NO: 12262 - protein, 11 aa, Artificial Sequence
  Description of Artificial Sequence: Synthetic peptide
AEAMSQANTTI

SEQ ID NO: 12263 - protein, 10 aa, Artificial Sequence
  Description of Artificial Sequence: Synthetic peptide
TETTNQKAEL

SEQ ID NO: 12264 - protein, 9 aa, Artificial Sequence
  Description of Artificial Sequence: Synthetic peptide
NEGVGNPQI

SEQ ID NO: 12265 - protein, 10 aa, Artificial Sequence
  Description of Artificial Sequence: Synthetic peptide
AETGQDTAYF

SEQ ID NO: 12266 - protein, 9 aa, Artificial Sequence
  Description of Artificial Sequence: Synthetic peptide
EEGVGSPQI

SEQ ID NO: 12267 - protein, 10 aa, Artificial Sequence
  Description of Artificial Sequence: Synthetic peptide
KEINNYSNTI

SEQ ID NO: 12268 - protein, 11 aa, Artificial Sequence
  Description of Artificial Sequence: Synthetic peptide
AEIQKQGDGQW

SEQ ID NO: 12269 - protein, 10 aa, Artificial Sequence
  Description of Artificial Sequence: Synthetic peptide
TEPIIGAETF

SEQ ID NO: 12270 - protein, 10 aa, Artificial Sequence
  Description of Artificial Sequence: Synthetic peptide
TEPIVGAETF

SEQ ID NO: 12271 - protein, 11 aa, Artificial Sequence
  Description of Artificial Sequence: Synthetic peptide
AELQKQGQGQW

SEQ ID NO: 12272 - protein, 9 aa, Artificial Sequence
  Description of Artificial Sequence: Synthetic peptide
SEEPVPLQL

SEQ ID NO: 12273 - protein, 9 aa, Artificial Sequence
  Description of Artificial Sequence: Synthetic peptide
AEKGVSQNY

SEQ ID NO: 12274 - protein, 10 aa, Artificial Sequence
  Description of Artificial Sequence: Synthetic peptide
TEEGVGSPQI

SEQ ID NO: 12275 - protein, 10 aa, Artificial Sequence
  Description of Artificial Sequence: Synthetic peptide
TEPIAGADTF

SEQ ID NO: 12276 - protein, 8 aa, Artificial Sequence
  Description of Artificial Sequence: Synthetic peptide
AELQAIHL

SEQ ID NO: 12277 - protein, 11 aa, Artificial Sequence
  Description of Artificial Sequence: Synthetic peptide
SEIVNKIIEKL

SEQ ID NO: 12278 - protein, 11 aa, Artificial Sequence
  Description of Artificial Sequence: Synthetic peptide
EEDIIIRSQNI

SEQ ID NO: 12279 - protein, 10 aa, Artificial Sequence
  Description of Artificial Sequence: Synthetic peptide
GELYPPLASL

SEQ ID NO: 12280 - protein, 9 aa, Artificial Sequence
  Description of Artificial Sequence: Synthetic peptide
DELFNDTKF

SEQ ID NO: 12281 - protein, 11 aa, Artificial Sequence
  Description of Artificial Sequence: Synthetic peptide
AEGTDRIIEVL

SEQ ID NO: 12282 - protein, 9 aa, Artificial Sequence
  Description of Artificial Sequence: Synthetic peptide
SEGATPTDL

SEQ ID NO: 12283 - protein, 11 aa, Artificial Sequence
  Description of Artificial Sequence: Synthetic peptide
AEGTDRVIEAL

SEQ ID NO: 12284 - protein, 8 aa, Artificial Sequence
  Description of Artificial Sequence: Synthetic peptide
CEINGTQW

SEQ ID NO: 12285 - protein, 11 aa, Artificial Sequence
  Description of Artificial Sequence: Synthetic peptide
QELKNSAISLF

SEQ ID NO: 12286 - protein, 9 aa, Artificial Sequence
  Description of Artificial Sequence: Synthetic peptide
EELAALGKM

SEQ ID NO: 12287 - protein, 11 aa, Artificial Sequence
  Description of Artificial Sequence: Synthetic peptide
QEVALNVTENF

SEQ ID NO: 12288 - protein, 8 aa, Artificial Sequence
  Description of Artificial Sequence: Synthetic peptide
AELQAIYL

SEQ ID NO: 12289 - protein, 10 aa, Artificial Sequence
  Description of Artificial Sequence: Synthetic peptide
EEVKLVITTY

SEQ ID NO: 12290 - protein, 10 aa, Artificial Sequence
  Description of Artificial Sequence: Synthetic peptide
AELQAIHLAL

SEQ ID NO: 12291 - protein, 9 aa, Artificial Sequence
  Description of Artificial Sequence: Synthetic peptide
MEMEKEGKI

SEQ ID NO: 12292 - protein, 11 aa, Artificial Sequence
  Description of Artificial Sequence: Synthetic peptide
AEAMSQANSAI

SEQ ID NO: 12293 - protein, 10 aa, Artificial Sequence
  Description of Artificial Sequence: Synthetic peptide
KELTDAVQKV

SEQ ID NO: 12294 - protein, 9 aa, Artificial Sequence
  Description of Artificial Sequence: Synthetic peptide
EEGVGSSQI

SEQ ID NO: 12295 - protein, 10 aa, Artificial Sequence
  Description of Artificial Sequence: Synthetic peptide
IEQLIQKEKI

SEQ ID NO: 12296 - protein, 10 aa, Artificial Sequence
  Description of Artificial Sequence: Synthetic peptide
EEAKLVVTTY

SEQ ID NO: 12297 - protein, 8 aa, Artificial Sequence
  Description of Artificial Sequence: Synthetic peptide
NESNIETF

SEQ ID NO: 12298 - protein, 10 aa, Artificial Sequence
  Description of Artificial Sequence: Synthetic peptide
KEISNYSKTI

SEQ ID NO: 12299 - protein, 9 aa, Artificial Sequence
  Description of Artificial Sequence: Synthetic peptide
SEYIEAEVI

SEQ ID NO: 12300 - protein, 11 aa, Artificial Sequence
  Description of Artificial Sequence: Synthetic peptide
EEGQYPPLASL

SEQ ID NO: 12301 - protein, 11 aa, Artificial Sequence
  Description of Artificial Sequence: Synthetic peptide
AEQATQEVKGW

SEQ ID NO: 12302 - protein, 10 aa, Artificial Sequence
  Description of Artificial Sequence: Synthetic peptide
EELKSLYNTI

SEQ ID NO: 12303 - protein, 10 aa, Artificial Sequence
  Description of Artificial Sequence: Synthetic peptide
TEPIAGAETF

SEQ ID NO: 12304 - protein, 11 aa, Artificial Sequence
  Description of Artificial Sequence: Synthetic peptide
AEGVGAVSQDL

SEQ ID NO: 12305 - protein, 11 aa, Artificial Sequence
  Description of Artificial Sequence: Synthetic peptide
AEQASQEVKNW

SEQ ID NO: 12306 - protein, 11 aa, Artificial Sequence
  Description of Artificial Sequence: Synthetic peptide
AEGTDRVIEVL

SEQ ID NO: 12307 - protein, 8 aa, Artificial Sequence
  Description of Artificial Sequence: Synthetic peptide
AELQAIQL

SEQ ID NO: 12308 - protein, 10 aa, Artificial Sequence
  Description of Artificial Sequence: Synthetic peptide
AELQAIQLAL

SEQ ID NO: 12309 - protein, 9 aa, Artificial Sequence
  Description of Artificial Sequence: Synthetic peptide
WENDMVEQM

SEQ ID NO: 12310 - protein, 10 aa, Artificial Sequence
  Description of Artificial Sequence: Synthetic peptide
QELKNSAISL

SEQ ID NO: 12311 - protein, 11 aa, Artificial Sequence
  Description of Artificial Sequence: Synthetic peptide
QELKNSAISLL

SEQ ID NO: 12312 - protein, 11 aa, Artificial Sequence
  Description of Artificial Sequence: Synthetic peptide
AEIQKQGQGQW

SEQ ID NO: 12313 - protein, 10 aa, Artificial Sequence
  Description of Artificial Sequence: Synthetic peptide
EELRSLYNTI

SEQ ID NO: 12314 - protein, 10 aa, Artificial Sequence
  Description of Artificial Sequence: Synthetic peptide
IEIKDTKEAL

SEQ ID NO: 12315 - protein, 9 aa, Artificial Sequence
  Description of Artificial Sequence: Synthetic peptide
SESAIRKAI

SEQ ID NO: 12316 - protein, 9 aa, Artificial Sequence
  Description of Artificial Sequence: Synthetic peptide
QEKNEQELL

SEQ ID NO: 12317 - protein, 9 aa, Artificial Sequence
  Description of Artificial Sequence: Synthetic peptide
TEAVQKIAL

SEQ ID NO: 12318 - protein, 11 aa, Artificial Sequence
  Description of Artificial Sequence: Synthetic peptide
SEIVNQIIEQL

SEQ ID NO: 12319 - protein, 11 aa, Artificial Sequence
  Description of Artificial Sequence: Synthetic peptide
SEVNIVTDSQY

SEQ ID NO: 12320 - protein, 9 aa, Artificial Sequence
  Description of Artificial Sequence: Synthetic peptide
SESEIVNQI

SEQ ID NO: 12321 - protein, 10 aa, Artificial Sequence
  Description of Artificial Sequence: Synthetic peptide
SESEIVNQII

SEQ ID NO: 12322 - protein, 11 aa, Artificial Sequence
  Description of Artificial Sequence: Synthetic peptide
SELVNQIIEQL

SEQ ID NO: 12323 - protein, 11 aa, Artificial Sequence
  Description of Artificial Sequence: Synthetic peptide
AELELAENREI

SEQ ID NO: 12324 - protein, 10 aa, Artificial Sequence
  Description of Artificial Sequence: Synthetic peptide
AETGQETAYF

SEQ ID NO: 12325 - protein, 10 aa, Artificial Sequence
  Description of Artificial Sequence: Synthetic peptide
AEHLKTAVQM

SEQ ID NO: 12326 - protein, 9 aa, Artificial Sequence
  Description of Artificial Sequence: Synthetic peptide
SESELVNQI

SEQ ID NO: 12327 - protein, 9 aa, Artificial Sequence
  Description of Artificial Sequence: Synthetic peptide
SEGATPQDL

SEQ ID NO: 12328 - protein, 9 aa, Artificial Sequence
  Description of Artificial Sequence: Synthetic peptide
ATKGLGISY

SEQ ID NO: 12329 - protein, 9 aa, Artificial Sequence
  Description of Artificial Sequence: Synthetic peptide
TTKGLGISY

SEQ ID NO: 12330 - protein, 9 aa, Artificial Sequence
  Description of Artificial Sequence: Synthetic peptide
VAVHVASEY

SEQ ID NO: 12331 - protein, 9 aa, Artificial Sequence
  Description of Artificial Sequence: Synthetic peptide
IGNNNSSEY

SEQ ID NO: 12332 - protein, 9 aa, Artificial Sequence
  Description of Artificial Sequence: Synthetic peptide
FLKNVTENF

SEQ ID NO: 12333 - protein, 8 aa, Artificial Sequence
  Description of Artificial Sequence: Synthetic peptide
AVHVASEY

SEQ ID NO: 12334 - protein, 10 aa, Artificial Sequence
  Description of Artificial Sequence: Synthetic peptide
SIHLGPGQAF

SEQ ID NO: 12335 - protein, 9 aa, Artificial Sequence
  Description of Artificial Sequence: Synthetic peptide
RAVAIGAVF

SEQ ID NO: 12336 - protein, 10 aa, Artificial Sequence
  Description of Artificial Sequence: Synthetic peptide
SIRIGPGQSF

SEQ ID NO: 12337 - protein, 9 aa, Artificial Sequence
  Description of Artificial Sequence: Synthetic peptide
KAKPPLPSV

SEQ ID NO: 12338 - protein, 10 aa, Artificial Sequence
  Description of Artificial Sequence: Synthetic peptide
ILKEPVHGAY

SEQ ID NO: 12339 - protein, 10 aa, Artificial Sequence
  Description of Artificial Sequence: Synthetic peptide
ILKEPVHGVY

SEQ ID NO: 12340 - protein, 9 aa, Artificial Sequence
  Description of Artificial Sequence: Synthetic peptide
GQYPPLASL

SEQ ID NO: 12341 - protein, 8 aa, Artificial Sequence
  Description of Artificial Sequence: Synthetic peptide
GQMVHQSL

SEQ ID NO: 12342 - protein, 11 aa, Artificial Sequence
  Description of Artificial Sequence: Synthetic peptide
GSFISGDINNL

SEQ ID NO: 12343 - protein, 9 aa, Artificial Sequence
  Description of Artificial Sequence: Synthetic peptide
TKTQVQEKL

SEQ ID NO: 12344 - protein, 10 aa, Artificial Sequence
  Description of Artificial Sequence: Synthetic peptide
HQDPVPKQPL

SEQ ID NO: 12345 - protein, 11 aa, Artificial Sequence
  Description of Artificial Sequence: Synthetic peptide
SQISGESHAVL

SEQ ID NO: 12346 - protein, 8 aa, Artificial Sequence
  Description of Artificial Sequence: Synthetic peptide
GKQKVVSL

SEQ ID NO: 12347 - protein, 9 aa, Artificial Sequence
  Description of Artificial Sequence: Synthetic peptide
GLYPPLASL

SEQ ID NO: 12348 - protein, 11 aa, Artificial Sequence
  Description of Artificial Sequence: Synthetic peptide
SQISGESHTVL

SEQ ID NO: 12349 - protein, 9 aa, Artificial Sequence
  Description of Artificial Sequence: Synthetic peptide
KALGTGATL

SEQ ID NO: 12350 - protein, 8 aa, Artificial Sequence
  Description of Artificial Sequence: Synthetic peptide
AQYWSQEL

SEQ ID NO: 12351 - protein, 9 aa, Artificial Sequence
  Description of Artificial Sequence: Synthetic peptide
FISGDINNL

SEQ ID NO: 12352 - protein, 11 aa, Artificial Sequence
  Description of Artificial Sequence: Synthetic peptide
TQIDPDLADQL

SEQ ID NO: 12353 - protein, 9 aa, Artificial Sequence
  Description of Artificial Sequence: Synthetic peptide
KALGPGATL

SEQ ID NO: 12354 - protein, 8 aa, Artificial Sequence
  Description of Artificial Sequence: Synthetic peptide
HKAIGTVL

SEQ ID NO: 12355 - protein, 9 aa, Artificial Sequence
  Description of Artificial Sequence: Synthetic peptide
IKPVVSTQL

SEQ ID NO: 12356 - protein, 9 aa, Artificial Sequence
  Description of Artificial Sequence: Synthetic peptide
RAIEAQQHL

SEQ ID NO: 12357 - protein, 9 aa, Artificial Sequence
  Description of Artificial Sequence: Synthetic peptide
HQAISPRTL

SEQ ID NO: 12358 - protein, 8 aa, Artificial Sequence
  Description of Artificial Sequence: Synthetic peptide
HQAAMQML

SEQ ID NO: 12359 - protein, 8 aa, Artificial Sequence
  Description of Artificial Sequence: Synthetic peptide
KQLQARVL

SEQ ID NO: 12360 - protein, 9 aa, Artificial Sequence
  Description of Artificial Sequence: Synthetic peptide
SEYIEAEVI

SEQ ID NO: 12361 - protein, 9 aa, Artificial Sequence
  Description of Artificial Sequence: Synthetic peptide
SESEIVNKI

SEQ ID NO: 12362 - protein, 10 aa, Artificial Sequence
  Description of Artificial Sequence: Synthetic peptide
AEEGVGSSQI

SEQ ID NO: 12363 - protein, 10 aa, Artificial Sequence
  Description of Artificial Sequence: Synthetic peptide
KEINNYSNTI

SEQ ID NO: 12364 - protein, 10 aa, Artificial Sequence
  Description of Artificial Sequence: Synthetic peptide
GEIVIRSQNI

SEQ ID NO: 12365 - protein, 8 aa, Artificial Sequence
  Description of Artificial Sequence: Synthetic peptide
VEIEPLGV

SEQ ID NO: 12366 - protein, 10 aa, Artificial Sequence
  Description of Artificial Sequence: Synthetic peptide
KELTDAVQKV

SEQ ID NO: 12367 - protein, 11 aa, Artificial Sequence
  Description of Artificial Sequence: Synthetic peptide
AEAMSQANTTI

SEQ ID NO: 12368 - protein, 9 aa, Artificial Sequence
  Description of Artificial Sequence: Synthetic peptide
NEGVGNPQI

SEQ ID NO: 12369 - protein, 10 aa, Artificial Sequence
  Description of Artificial Sequence: Synthetic peptide
TEEGVGSPQI

SEQ ID NO: 12370 - protein, 9 aa, Artificial Sequence
  Description of Artificial Sequence: Synthetic peptide
EEGVGSPQI

SEQ ID NO: 12371 - protein, 9 aa, Artificial Sequence
  Description of Artificial Sequence: Synthetic peptide
MEMEKEGKI

SEQ ID NO: 12372 - protein, 9 aa, Artificial Sequence
  Description of Artificial Sequence: Synthetic peptide
KEISNYSNI

SEQ ID NO: 12373 - protein, 11 aa, Artificial Sequence
  Description of Artificial Sequence: Synthetic peptide
SEELRSLFNTV

SEQ ID NO: 12374 - protein, 8 aa, Artificial Sequence
  Description of Artificial Sequence: Synthetic peptide
SEYIEAEV

SEQ ID NO: 12375 - protein, 8 aa, Artificial Sequence
  Description of Artificial Sequence: Synthetic peptide
YEKEAHNV

SEQ ID NO: 12376 - protein, 8 aa, Artificial Sequence
  Description of Artificial Sequence: Synthetic peptide
YEREVHNV

SEQ ID NO: 12377 - protein, 10 aa, Artificial Sequence
  Description of Artificial Sequence: Synthetic peptide
KEISNYSNII

SEQ ID NO: 12378 - protein, 9 aa, Artificial Sequence
  Description of Artificial Sequence: Synthetic peptide
AEGRGTGTV

SEQ ID NO: 12379 - protein, 9 aa, Artificial Sequence
  Description of Artificial Sequence: Synthetic peptide
TEAVQKISL

SEQ ID NO: 12380 - protein, 8 aa, Artificial Sequence
  Description of Artificial Sequence: Synthetic peptide
YEREAHNV

SEQ ID NO: 12381 - protein, 10 aa, Artificial Sequence
  Description of Artificial Sequence: Synthetic peptide
KELQKQVTKI

SEQ ID NO: 12382 - protein, 9 aa, Artificial Sequence
  Description of Artificial Sequence: Synthetic peptide
LEMEKEGKI

SEQ ID NO: 12383 - protein, 9 aa, Artificial Sequence
  Description of Artificial Sequence: Synthetic peptide
MENRWQVTI

SEQ ID NO: 12384 - protein, 9 aa, Artificial Sequence
  Description of Artificial Sequence: Synthetic peptide
VEQMHTDII

SEQ ID NO: 12385 - protein, 10 aa, Artificial Sequence
  Description of Artificial Sequence: Synthetic peptide
GEIIGDIRKA

SEQ ID NO: 12386 - protein, 10 aa, Artificial Sequence
  Description of Artificial Sequence: Synthetic peptide
EELRSLFNTV

SEQ ID NO: 12387 - protein, 8 aa, Artificial Sequence
  Description of Artificial Sequence: Synthetic peptide
YEKEVHNV

SEQ ID NO: 12388 - protein, 8 aa, Artificial Sequence
  Description of Artificial Sequence: Synthetic peptide
AENLWVTV

SEQ ID NO: 12389 - protein, 9 aa, Artificial Sequence
  Description of Artificial Sequence: Synthetic peptide
SESAIRKAI

SEQ ID NO: 12390 - protein, 9 aa, Artificial Sequence
  Description of Artificial Sequence: Synthetic peptide
TEAVQKIAL

SEQ ID NO: 12391 - protein, 9 aa, Artificial Sequence
  Description of Artificial Sequence: Synthetic peptide
SESEIVNQI

SEQ ID NO: 12392 - protein, 8 aa, Artificial Sequence
  Description of Artificial Sequence: Synthetic peptide
SEIVNQII

SEQ ID NO: 12393 - protein, 10 aa, Artificial Sequence
  Description of Artificial Sequence: Synthetic peptide
EELKSLFNTV

SEQ ID NO: 12394 - protein, 11 aa, Artificial Sequence
  Description of Artificial Sequence: Synthetic peptide
AELELAENREI

SEQ ID NO: 12395 - protein, 9 aa, Artificial Sequence
  Description of Artificial Sequence: Synthetic peptide
SESELVNQI

SEQ ID NO: 12396 - protein, 9 aa, Artificial Sequence
  Description of Artificial Sequence: Synthetic peptide
VEIEPLGVA

SEQ ID NO: 12397 - protein, 9 aa, Artificial Sequence
  Description of Artificial Sequence: Synthetic peptide
LETEPIVGA

SEQ ID NO: 12398 - protein, 9 aa, Artificial Sequence
  Description of Artificial Sequence: Synthetic peptide
LETEPIIGA

SEQ ID NO: 12399 - protein, 9 aa, Artificial Sequence
  Description of Artificial Sequence: Synthetic peptide
AEWDRLHPA

SEQ ID NO: 12400 - protein, 9 aa, Artificial Sequence
  Description of Artificial Sequence: Synthetic peptide
FISGDINNL

SEQ ID NO: 12401 - protein, 9 aa, Artificial Sequence
  Description of Artificial Sequence: Synthetic peptide
AIIGDIRKA

SEQ ID NO: 12402 - protein, 11 aa, Artificial Sequence
  Description of Artificial Sequence: Synthetic peptide
AEAMSQATNAA

SEQ ID NO: 12403 - protein, 9 aa, Artificial Sequence
  Description of Artificial Sequence: Synthetic peptide
VEVKDTKEA

SEQ ID NO: 12404 - protein, 10 aa, Artificial Sequence
  Description of Artificial Sequence: Synthetic peptide
AEWTDRVIEA

SEQ ID NO: 12405 - protein, 10 aa, Artificial Sequence
  Description of Artificial Sequence: Synthetic peptide
VEIEPLGVAP

SEQ ID NO: 12406 - protein, 9 aa, Artificial Sequence
  Description of Artificial Sequence: Synthetic peptide
FIPGDINNL

SEQ ID NO: 12407 - protein, 11 aa, Artificial Sequence
  Description of Artificial Sequence: Synthetic peptide
AEAMSQATNTA

SEQ ID NO: 12408 - protein, 10 aa, Artificial Sequence
  Description of Artificial Sequence: Synthetic peptide
SEVHIPLETA

SEQ ID NO: 12409 - protein, 9 aa, Artificial Sequence
  Description of Artificial Sequence: Synthetic peptide
AVFLGFLSA

SEQ ID NO: 12410 - protein, 9 aa, Artificial Sequence
  Description of Artificial Sequence: Synthetic peptide
GEMGSFISG

SEQ ID NO: 12411 - protein, 9 aa, Artificial Sequence
  Description of Artificial Sequence: Synthetic peptide
EQVDRLVSA

SEQ ID NO: 12412 - protein, 10 aa, Artificial Sequence
  Description of Artificial Sequence: Synthetic peptide
QEVGRAMYAA

SEQ ID NO: 12413 - protein, 10 aa, Artificial Sequence
  Description of Artificial Sequence: Synthetic peptide
AEAMSQANSA

SEQ ID NO: 12414 - protein, 9 aa, Artificial Sequence
  Description of Artificial Sequence: Synthetic peptide
RVIEALQRA

SEQ ID NO: 12415 - protein, 9 aa, Artificial Sequence
  Description of Artificial Sequence: Synthetic peptide
RVIEVLQRA

SEQ ID NO: 12416 - protein, 10 aa, Artificial Sequence
  Description of Artificial Sequence: Synthetic peptide
SEVHIPLEEA

SEQ ID NO: 12417 - protein, 9 aa, Artificial Sequence
  Description of Artificial Sequence: Synthetic peptide
AELQAIHLA

SEQ ID NO: 12418 - protein, 10 aa, Artificial Sequence
  Description of Artificial Sequence: Synthetic peptide
AVFLGFLSAA

SEQ ID NO: 12419 - protein, 9 aa, Artificial Sequence
  Description of Artificial Sequence: Synthetic peptide
VVAEGTDRV

SEQ ID NO: 12420 - protein, 8 aa, Artificial Sequence
  Description of Artificial Sequence: Synthetic peptide
SERILVAC

SEQ ID NO: 12421 - protein, 10 aa, Artificial Sequence
  Description of Artificial Sequence: Synthetic peptide
AEGTDRVIEA

SEQ ID NO: 12422 - protein, 9 aa, Artificial Sequence
  Description of Artificial Sequence: Synthetic peptide
FIPGDVNNL

SEQ ID NO: 12423 - protein, 9 aa, Artificial Sequence
  Description of Artificial Sequence: Synthetic peptide
VVAEGTDRI

SEQ ID NO: 12424 - protein, 10 aa, Artificial Sequence
  Description of Artificial Sequence: Synthetic peptide
GEIIGDIRKA

SEQ ID NO: 12425 - protein, 11 aa, Artificial Sequence
  Description of Artificial Sequence: Synthetic peptide
TQIDPDLADQL

SEQ ID NO: 12426 - protein, 9 aa, Artificial Sequence
  Description of Artificial Sequence: Synthetic peptide
LETEPIAGA

SEQ ID NO: 12427 - protein, 9 aa, Artificial Sequence
  Description of Artificial Sequence: Synthetic peptide
AVAEWTDRV

SEQ ID NO: 12428 - protein, 9 aa, Artificial Sequence
  Description of Artificial Sequence: Synthetic peptide
QEVGRAMYA

SEQ ID NO: 12429 - protein, 9 aa, Artificial Sequence
  Description of Artificial Sequence: Synthetic peptide
AELQAIQLA

SEQ ID NO: 12430 - protein, 10 aa, Artificial Sequence
  Description of Artificial Sequence: Synthetic peptide
AEAMSQATNA

SEQ ID NO: 12431 - protein, 11 aa, Artificial Sequence
  Description of Artificial Sequence: Synthetic peptide
TQIDPGLADQL

SEQ ID NO: 12432 - protein, 9 aa, Artificial Sequence
  Description of Artificial Sequence: Synthetic peptide
IEIKDTKEA

SEQ ID NO: 12433 - protein, 9 aa, Artificial Sequence
  Description of Artificial Sequence: Synthetic peptide
ALFLGFLGA

SEQ ID NO: 12434 - protein, 9 aa, Artificial Sequence
  Description of Artificial Sequence: Synthetic peptide
ASITLTVQA

SEQ ID NO: 12435 - protein, 9 aa, Artificial Sequence
  Description of Artificial Sequence: Synthetic peptide
IEVKDTKEA

SEQ ID NO: 12436 - protein, 9 aa, Artificial Sequence
  Description of Artificial Sequence: Synthetic peptide
ATLEEMMTA

SEQ ID NO: 12437 - protein, 9 aa, Artificial Sequence
  Description of Artificial Sequence: Synthetic peptide
AETFYVDGA

SEQ ID NO: 12438 - protein, 9 aa, Artificial Sequence
  Description of Artificial Sequence: Synthetic peptide
EEVGFPVRP

SEQ ID NO: 12439 - protein, 9 aa, Artificial Sequence
  Description of Artificial Sequence: Synthetic peptide
FPVSPIETV

SEQ ID NO: 12440 - protein, 9 aa, Artificial Sequence
  Description of Artificial Sequence: Synthetic peptide
VPSLSFPQI

SEQ ID NO: 12441 - protein, 8 aa, Artificial Sequence
  Description of Artificial Sequence: Synthetic peptide
TAFTIPSL

SEQ ID NO: 12442 - protein, 9 aa, Artificial Sequence
  Description of Artificial Sequence: Synthetic peptide
IPAVVAKEI

SEQ ID NO: 12443 - protein, 8 aa, Artificial Sequence
  Description of Artificial Sequence: Synthetic peptide
SAPIAGRI

SEQ ID NO: 12444 - protein, 9 aa, Artificial Sequence
  Description of Artificial Sequence: Synthetic peptide
YAAPIAGNI

SEQ ID NO: 12445 - protein, 9 aa, Artificial Sequence
  Description of Artificial Sequence: Synthetic peptide
DSSLALRHI

SEQ ID NO: 12446 - protein, 9 aa, Artificial Sequence
  Description of Artificial Sequence: Synthetic peptide
SPLSFQTHI

SEQ ID NO: 12447 - protein, 8 aa, Artificial Sequence
  Description of Artificial Sequence: Synthetic peptide
IAQIQPSI

SEQ ID NO: 12448 - protein, 10 aa, Artificial Sequence
  Description of Artificial Sequence: Synthetic peptide
IPLETAELVI

SEQ ID NO: 12449 - protein, 9 aa, Artificial Sequence
  Description of Artificial Sequence: Synthetic peptide
DAKSYEKEV

SEQ ID NO: 12450 - protein, 9 aa, Artificial Sequence
  Description of Artificial Sequence: Synthetic peptide
DAKGYEREV

SEQ ID NO: 12451 - protein, 10 aa, Artificial Sequence
  Description of Artificial Sequence: Synthetic peptide
IPLEEAKLVV

SEQ ID NO: 12452 - protein, 9 aa, Artificial Sequence
  Description of Artificial Sequence: Synthetic peptide
YANPIAGNI

SEQ ID NO: 12453 - protein, 9 aa, Artificial Sequence
  Description of Artificial Sequence: Synthetic peptide
SPLSLQTLI

SEQ ID NO: 12454 - protein, 9 aa, Artificial Sequence
  Description of Artificial Sequence: Synthetic peptide
VPNNGTITL

SEQ ID NO: 12455 - protein, 9 aa, Artificial Sequence
  Description of Artificial Sequence: Synthetic peptide
SPASGELRV

SEQ ID NO: 12456 - protein, 8 aa, Artificial Sequence
  Description of Artificial Sequence: Synthetic peptide
VPVEPEEV

SEQ ID NO: 12457 - protein, 8 aa, Artificial Sequence
  Description of Artificial Sequence: Synthetic peptide
TAFTIPSV

SEQ ID NO: 12458 - protein, 8 aa, Artificial Sequence
  Description of Artificial Sequence: Synthetic peptide
VAFIVALI

SEQ ID NO: 12459 - protein, 8 aa, Artificial Sequence
  Description of Artificial Sequence: Synthetic peptide
DSWTVNDI

SEQ ID NO: 12460 - protein, 8 aa, Artificial Sequence
  Description of Artificial Sequence: Synthetic peptide
NPYNTPVF

SEQ ID NO: 12461 - protein, 8 aa, Artificial Sequence
  Description of Artificial Sequence: Synthetic peptide
TAYFILKL

SEQ ID NO: 12462 - protein, 9 aa, Artificial Sequence
  Description of Artificial Sequence: Synthetic peptide
LPPIVAKEI

SEQ ID NO: 12463 - protein, 8 aa, Artificial Sequence
  Description of Artificial Sequence: Synthetic peptide
SPVSILDI

SEQ ID NO: 12464 - protein, 9 aa, Artificial Sequence
  Description of Artificial Sequence: Synthetic peptide
LPPVVAKEI

SEQ ID NO: 12465 - protein, 9 aa, Artificial Sequence
  Description of Artificial Sequence: Synthetic peptide
FPISPIETV

SEQ ID NO: 12466 - protein, 10 aa, Artificial Sequence
  Description of Artificial Sequence: Synthetic peptide
IPYNPQSQGV

SEQ ID NO: 12467 - protein, 11 aa, Artificial Sequence
  Description of Artificial Sequence: Synthetic peptide
IPYNPQSQGVV

SEQ ID NO: 12468 - protein, 9 aa, Artificial Sequence
  Description of Artificial Sequence: Synthetic peptide
FPVSPIETV

SEQ ID NO: 12469 - protein, 9 aa, Artificial Sequence
  Description of Artificial Sequence: Synthetic peptide
LPKQPLSQA

SEQ ID NO: 12470 - protein, 9 aa, Artificial Sequence
  Description of Artificial Sequence: Synthetic peptide
VPKQPISQA

SEQ ID NO: 12471 - protein, 11 aa, Artificial Sequence
  Description of Artificial Sequence: Synthetic peptide
IPAVVAKEIVA

SEQ ID NO: 12472 - protein, 9 aa, Artificial Sequence
  Description of Artificial Sequence: Synthetic peptide
NPIAGNITC

SEQ ID NO: 12473 - protein, 10 aa, Artificial Sequence
  Description of Artificial Sequence: Synthetic peptide
YPSPDGTRQA

SEQ ID NO: 12474 - protein, 9 aa, Artificial Sequence
  Description of Artificial Sequence: Synthetic peptide
FPVRPQVPV

SEQ ID NO: 12475 - protein, 9 aa, Artificial Sequence
  Description of Artificial Sequence: Synthetic peptide
SPIAGNITC

SEQ ID NO: 12476 - protein, 9 aa, Artificial Sequence
  Description of Artificial Sequence: Synthetic peptide
APIAGNITC

SEQ ID NO: 12477 - protein, 9 aa, Artificial Sequence
  Description of Artificial Sequence: Synthetic peptide
AVFLGFLSA

SEQ ID NO: 12478 - protein, 9 aa, Artificial Sequence
  Description of Artificial Sequence: Synthetic peptide
EAMSQANSA

SEQ ID NO: 12479 - protein, 9 aa, Artificial Sequence
  Description of Artificial Sequence: Synthetic peptide
FPNNTAIKF

SEQ ID NO: 12480 - protein, 9 aa, Artificial Sequence
  Description of Artificial Sequence: Synthetic peptide
HPVHAGPAP

SEQ ID NO: 12481 - protein, 9 aa, Artificial Sequence
  Description of Artificial Sequence: Synthetic peptide
MASDFNIPA

SEQ ID NO: 12482 - protein, 11 aa, Artificial Sequence
  Description of Artificial Sequence: Synthetic peptide
NPIPEQPLSQA

SEQ ID NO: 12483 - protein, 9 aa, Artificial Sequence
  Description of Artificial Sequence: Synthetic peptide
HVASGYLEA

SEQ ID NO: 12484 - protein, 9 aa, Artificial Sequence
  Description of Artificial Sequence: Synthetic peptide
MRRPPPAAA

SEQ ID NO: 12485 - protein, 11 aa, Artificial Sequence
  Description of Artificial Sequence: Synthetic peptide
VPTDPNPQEVA

SEQ ID NO: 12486 - protein, 9 aa, Artificial Sequence
  Description of Artificial Sequence: Synthetic peptide
HVASEYIEA

SEQ ID NO: 12487 - protein, 9 aa, Artificial Sequence
  Description of Artificial Sequence: Synthetic peptide
FPRPWLHSL

SEQ ID NO: 12488 - protein, 8 aa, Artificial Sequence
  Description of Artificial Sequence: Synthetic peptide
FPNATIKF

SEQ ID NO: 12489 - protein, 9 aa, Artificial Sequence
  Description of Artificial Sequence: Synthetic peptide
EVHIPLETA

SEQ ID NO: 12490 - protein, 10 aa, Artificial Sequence
  Description of Artificial Sequence: Synthetic peptide
IPLEEAKLVV

SEQ ID NO: 12491 - protein, 8 aa, Artificial Sequence
  Description of Artificial Sequence: Synthetic peptide
TAFTIPSV

SEQ ID NO: 12492 - protein, 10 aa, Artificial Sequence
  Description of Artificial Sequence: Synthetic peptide
YPKPEGTRQA

SEQ ID NO: 12493 - protein, 9 aa, Artificial Sequence
  Description of Artificial Sequence: Synthetic peptide
DPIPIHYCA

SEQ ID NO: 12494 - protein, 9 aa, Artificial Sequence
  Description of Artificial Sequence: Synthetic peptide
EAMSQATNA

SEQ ID NO: 12495 - protein, 9 aa, Artificial Sequence
  Description of Artificial Sequence: Synthetic peptide
HPVHAGPIP

SEQ ID NO: 12496 - protein, 10 aa, Artificial Sequence
  Description of Artificial Sequence: Synthetic peptide
HPVHAGPIPP

SEQ ID NO: 12497 - protein, 10 aa, Artificial Sequence
  Description of Artificial Sequence: Synthetic peptide
EPLGVAPTKA

SEQ ID NO: 12498 - protein, 8 aa, Artificial Sequence
  Description of Artificial Sequence: Synthetic peptide
FPSEQTRA

SEQ ID NO: 12499 - protein, 9 aa, Artificial Sequence
  Description of Artificial Sequence: Synthetic peptide
EATTTLFCA

SEQ ID NO: 12500 - protein, 9 aa, Artificial Sequence
  Description of Artificial Sequence: Synthetic peptide
EANTTLFCA

SEQ ID NO: 12501 - protein, 9 aa, Artificial Sequence
  Description of Artificial Sequence: Synthetic peptide
NPYNTPVFA

SEQ ID NO: 12502 - protein, 9 aa, Artificial Sequence
  Description of Artificial Sequence: Synthetic peptide
NPYNTPIFA

SEQ ID NO: 12503 - protein, 11 aa, Artificial Sequence
  Description of Artificial Sequence: Synthetic peptide
LPPVVAKEIVA

SEQ ID NO: 12504 - protein, 11 aa, Artificial Sequence
  Description of Artificial Sequence: Synthetic peptide
MLNTVGGHQAA

SEQ ID NO: 12505 - protein, 9 aa, Artificial Sequence
  Description of Artificial Sequence: Synthetic peptide
FPISPIETV

SEQ ID NO: 12506 - protein, 9 aa, Artificial Sequence
  Description of Artificial Sequence: Synthetic peptide
HVASGYIEA

SEQ ID NO: 12507 - protein, 11 aa, Artificial Sequence
  Description of Artificial Sequence: Synthetic peptide
FPISPIETVPV

SEQ ID NO: 12508 - protein, 9 aa, Artificial Sequence
  Description of Artificial Sequence: Synthetic peptide
VPKQPISQA

SEQ ID NO: 12509 - protein, 9 aa, Artificial Sequence
  Description of Artificial Sequence: Synthetic peptide
LPKQPLSQA

SEQ ID NO: 12510 - protein, 9 aa, Artificial Sequence
  Description of Artificial Sequence: Synthetic peptide
APIAGNITC

SEQ ID NO: 12511 - protein, 9 aa, Artificial Sequence
  Description of Artificial Sequence: Synthetic peptide
VPKQPLSQP

SEQ ID NO: 12512 - protein, 10 aa, Artificial Sequence
  Description of Artificial Sequence: Synthetic peptide
YPSPDGTRQA

SEQ ID NO: 12513 - protein, 9 aa, Artificial Sequence
  Description of Artificial Sequence: Synthetic peptide
APIAGRINC

SEQ ID NO: 12514 - protein, 9 aa, Artificial Sequence
  Description of Artificial Sequence: Synthetic peptide
FPVSPIETV

SEQ ID NO: 12515 - protein, 9 aa, Artificial Sequence
  Description of Artificial Sequence: Synthetic peptide
SPIAGNITC

SEQ ID NO: 12516 - protein, 9 aa, Artificial Sequence
  Description of Artificial Sequence: Synthetic peptide
NPIAGNITC

SEQ ID NO: 12517 - protein, 10 aa, Artificial Sequence
  Description of Artificial Sequence: Synthetic peptide
YPKPEGTRQA

SEQ ID NO: 12518 - protein, 9 aa, Artificial Sequence
  Description of Artificial Sequence: Synthetic peptide
KAKPPLPSV

SEQ ID NO: 12519 - protein, 9 aa, Artificial Sequence
  Description of Artificial Sequence: Synthetic peptide
RPEPTAPPA

SEQ ID NO: 12520 - protein, 9 aa, Artificial Sequence
  Description of Artificial Sequence: Synthetic peptide
FPISPIETV

SEQ ID NO: 12521 - protein, 9 aa, Artificial Sequence
  Description of Artificial Sequence: Synthetic peptide
VPKQPISQA

SEQ ID NO: 12522 - protein, 9 aa, Artificial Sequence
  Description of Artificial Sequence: Synthetic peptide
APIAGNITC

SEQ ID NO: 12523 - protein, 9 aa, Artificial Sequence
  Description of Artificial Sequence: Synthetic peptide
SPIAGNITC

SEQ ID NO: 12524 - protein, 9 aa, Artificial Sequence
  Description of Artificial Sequence: Synthetic peptide
LPKQPLSQA

SEQ ID NO: 12525 - protein, 9 aa, Artificial Sequence
  Description of Artificial Sequence: Synthetic peptide
FPVSPIETV

SEQ ID NO: 12526 - protein, 11 aa, Artificial Sequence
  Description of Artificial Sequence: Synthetic peptide
IPAVVAKEIVA

SEQ ID NO: 12527 - protein, 9 aa, Artificial Sequence
  Description of Artificial Sequence: Synthetic peptide
NPIAGNITC

SEQ ID NO: 12528 - protein, 10 aa, Artificial Sequence
  Description of Artificial Sequence: Synthetic peptide
YPSPDGTRQA

SEQ ID NO: 12529 - protein, 11 aa, Artificial Sequence
  Description of Artificial Sequence: Synthetic peptide
NPIPEQPLSQA

SEQ ID NO: 12530 - protein, 9 aa, Artificial Sequence
  Description of Artificial Sequence: Synthetic peptide
APIAGRINC

SEQ ID NO: 12531 - protein, 9 aa, Artificial Sequence
  Description of Artificial Sequence: Synthetic peptide
AVFLGFLSA

SEQ ID NO: 12532 - protein, 11 aa, Artificial Sequence
  Description of Artificial Sequence: Synthetic peptide
VPTDPNPQEVA

SEQ ID NO: 12533 - protein, 9 aa, Artificial Sequence
  Description of Artificial Sequence: Synthetic peptide
IPEQPLSQA

SEQ ID NO: 12534 - protein, 11 aa, Artificial Sequence
  Description of Artificial Sequence: Synthetic peptide
SPLSLQTLIPA

SEQ ID NO: 12535 - protein, 10 aa, Artificial Sequence
  Description of Artificial Sequence: Synthetic peptide
TPTAAEGVGA

SEQ ID NO: 12536 - protein, 10 aa, Artificial Sequence
  Description of Artificial Sequence: Synthetic peptide
YPKPEGTRQA

SEQ ID NO: 12537 - protein, 10 aa, Artificial Sequence
  Description of Artificial Sequence: Synthetic peptide
EPLGVAPTKA

SEQ ID NO: 12538 - protein, 9 aa, Artificial Sequence
  Description of Artificial Sequence: Synthetic peptide
NPYNTPVFA

SEQ ID NO: 12539 - protein, 9 aa, Artificial Sequence
  Description of Artificial Sequence: Synthetic peptide
NPYNTPIFA

SEQ ID NO: 12540 - protein, 9 aa, Artificial Sequence
  Description of Artificial Sequence: Synthetic peptide
RPEPTAPPA

SEQ ID NO: 12541 - protein, 9 aa, Artificial Sequence
  Description of Artificial Sequence: Synthetic peptide
FPISPIETV

SEQ ID NO: 12542 - protein, 10 aa, Artificial Sequence
  Description of Artificial Sequence: Synthetic peptide
IPAETGQETA

SEQ ID NO: 12543 - protein, 10 aa, Artificial Sequence
  Description of Artificial Sequence: Synthetic peptide
IPYNPQSQGV

SEQ ID NO: 12544 - protein, 9 aa, Artificial Sequence
  Description of Artificial Sequence: Synthetic peptide
VPKQPISQA

SEQ ID NO: 12545 - protein, 9 aa, Artificial Sequence
  Description of Artificial Sequence: Synthetic peptide
APIAGNITC

SEQ ID NO: 12546 - protein, 9 aa, Artificial Sequence
  Description of Artificial Sequence: Synthetic peptide
SPIAGNITC

SEQ ID NO: 12547 - protein, 9 aa, Artificial Sequence
  Description of Artificial Sequence: Synthetic peptide
LPKQPLSQA

SEQ ID NO: 12548 - protein, 9 aa, Artificial Sequence
  Description of Artificial Sequence: Synthetic peptide
FPVSPIETV

SEQ ID NO: 12549 - protein, 9 aa, Artificial Sequence
  Description of Artificial Sequence: Synthetic peptide
APIAGRINC

SEQ ID NO: 12550 - protein, 9 aa, Artificial Sequence
  Description of Artificial Sequence: Synthetic peptide
NPIAGNITC

SEQ ID NO: 12551 - protein, 11 aa, Artificial Sequence
  Description of Artificial Sequence: Synthetic peptide
IPAVVAKEIVA

SEQ ID NO: 12552 - protein, 10 aa, Artificial Sequence
  Description of Artificial Sequence: Synthetic peptide
YPSPDGTRQA

SEQ ID NO: 12553 - protein, 9 aa, Artificial Sequence
  Description of Artificial Sequence: Synthetic peptide
AVFLGFLSA

SEQ ID NO: 12554 - protein, 9 aa, Artificial Sequence
  Description of Artificial Sequence: Synthetic peptide
SPASRELQV

SEQ ID NO: 12555 - protein, 11 aa, Artificial Sequence
  Description of Artificial Sequence: Synthetic peptide
VPTDPNPQEVA

SEQ ID NO: 12556 - protein, 9 aa, Artificial Sequence
  Description of Artificial Sequence: Synthetic peptide
SPASGELRV

SEQ ID NO: 12557 - protein, 10 aa, Artificial Sequence
  Description of Artificial Sequence: Synthetic peptide
YPKPEGTRQA

SEQ ID NO: 12558 - protein, 9 aa, Artificial Sequence
  Description of Artificial Sequence: Synthetic peptide
NPYPKPEGT

SEQ ID NO: 12559 - protein, 10 aa, Artificial Sequence
  Description of Artificial Sequence: Synthetic peptide
APAGYAILKC

SEQ ID NO: 12560 - protein, 10 aa, Artificial Sequence
  Description of Artificial Sequence: Synthetic peptide
SPEVIPMFSA

SEQ ID NO: 12561 - protein, 9 aa, Artificial Sequence
  Description of Artificial Sequence: Synthetic peptide
RPEPTAPPA

SEQ ID NO: 12562 - protein, 9 aa, Artificial Sequence
  Description of Artificial Sequence: Synthetic peptide
NPYNTPIFA

SEQ ID NO: 12563 - protein, 9 aa, Artificial Sequence
  Description of Artificial Sequence: Synthetic peptide
FPISPIETV

SEQ ID NO: 12564 - protein, 10 aa, Artificial Sequence
  Description of Artificial Sequence: Synthetic peptide
IPYNPQSQGV

SEQ ID NO: 12565 - protein, 10 aa, Artificial Sequence
  Description of Artificial Sequence: Synthetic peptide
IPAETGQETA

SEQ ID NO: 12566 - protein, 9 aa, Artificial Sequence
  Description of Artificial Sequence: Synthetic peptide
ATAIAVAEW

SEQ ID NO: 12567 - protein, 9 aa, Artificial Sequence
  Description of Artificial Sequence: Synthetic peptide
LSLPQITFW

SEQ ID NO: 12568 - protein, 10 aa, Artificial Sequence
  Description of Artificial Sequence: Synthetic peptide
TTNVPWNTSW

SEQ ID NO: 12569 - protein, 11 aa, Artificial Sequence
  Description of Artificial Sequence: Synthetic peptide
KSYEKEVHNVW

SEQ ID NO: 12570 - protein, 11 aa, Artificial Sequence
  Description of Artificial Sequence: Synthetic peptide
KAYEREAHNVW

SEQ ID NO: 12571 - protein, 11 aa, Artificial Sequence
  Description of Artificial Sequence: Synthetic peptide
RTVDRGLTRGW

SEQ ID NO: 12572 - protein, 9 aa, Artificial Sequence
  Description of Artificial Sequence: Synthetic peptide
STLQEQIQW

SEQ ID NO: 12573 - protein, 11 aa, Artificial Sequence
  Description of Artificial Sequence: Synthetic peptide
KSYEKEAHNVW

SEQ ID NO: 12574 - protein, 11 aa, Artificial Sequence
  Description of Artificial Sequence: Synthetic peptide
KSIRIGPGQSF

SEQ ID NO: 12575 - protein, 9 aa, Artificial Sequence
  Description of Artificial Sequence: Synthetic peptide
RIKQFVNMW

SEQ ID NO: 12576 - protein, 10 aa, Artificial Sequence
  Description of Artificial Sequence: Synthetic peptide
ISLGPGRVFY

SEQ ID NO: 12577 - protein, 9 aa, Artificial Sequence
  Description of Artificial Sequence: Synthetic peptide
ISLESIVIW

SEQ ID NO: 12578 - protein, 10 aa, Artificial Sequence
  Description of Artificial Sequence: Synthetic peptide
KYLGNLTQYW

SEQ ID NO: 12579 - protein, 9 aa, Artificial Sequence
  Description of Artificial Sequence: Synthetic peptide
KGSPAIFQY

SEQ ID NO: 12580 - protein, 9 aa, Artificial Sequence
  Description of Artificial Sequence: Synthetic peptide
RSVRLVTGF

SEQ ID NO: 12581 - protein, 11 aa, Artificial Sequence
  Description of Artificial Sequence: Synthetic peptide
TTSTLQEQIQW

SEQ ID NO: 12582 - protein, 9 aa, Artificial Sequence
  Description of Artificial Sequence: Synthetic peptide
ATKGLGISY

SEQ ID NO: 12583 - protein, 10 aa, Artificial Sequence
  Description of Artificial Sequence: Synthetic peptide
KYLGNLTRYW

SEQ ID NO: 12584 - protein, 9 aa, Artificial Sequence
  Description of Artificial Sequence: Synthetic peptide
GLLPGEREW

SEQ ID NO: 12585 - protein, 10 aa, Artificial Sequence
  Description of Artificial Sequence: Synthetic peptide
KYLGNIIQYW

SEQ ID NO: 12586 - protein, 9 aa, Artificial Sequence
  Description of Artificial Sequence: Synthetic peptide
RSVRLVNGF

SEQ ID NO: 12587 - protein, 9 aa, Artificial Sequence
  Description of Artificial Sequence: Synthetic peptide
TTKGLGISY

SEQ ID NO: 12588 - protein, 11 aa, Artificial Sequence
  Description of Artificial Sequence: Synthetic peptide
KSIHLGPGQAF

SEQ ID NO: 12589 - protein, 9 aa, Artificial Sequence
  Description of Artificial Sequence: Synthetic peptide
KTKPPLPSV

SEQ ID NO: 12590 - protein, 11 aa, Artificial Sequence
  Description of Artificial Sequence: Synthetic peptide
KSLFNTVAVLY

SEQ ID NO: 12591 - protein, 11 aa, Artificial Sequence
  Description of Artificial Sequence: Synthetic peptide
RSLFNTVAVLY

SEQ ID NO: 12592 - protein, 10 aa, Artificial Sequence
  Description of Artificial Sequence: Synthetic peptide
KSLFGNDPSQ

SEQ ID NO: 12593 - protein, 9 aa, Artificial Sequence
  Description of Artificial Sequence: Synthetic peptide
ISLGPGRVF

SEQ ID NO: 12594 - protein, 9 aa, Artificial Sequence
  Description of Artificial Sequence: Synthetic peptide
RVRGMQRNW

SEQ ID NO: 12595 - protein, 9 aa, Artificial Sequence
  Description of Artificial Sequence: Synthetic peptide
LSFPQITLW

SEQ ID NO: 12596 - protein, 11 aa, Artificial Sequence
  Description of Artificial Sequence: Synthetic peptide
KSLYNTIAVLY

SEQ ID NO: 12597 - protein, 9 aa, Artificial Sequence
  Description of Artificial Sequence: Synthetic peptide
RIKQIVNMW

SEQ ID NO: 12598 - protein, 9 aa, Artificial Sequence
  Description of Artificial Sequence: Synthetic peptide
RAVGIGALF

SEQ ID NO: 12599 - protein, 10 aa, Artificial Sequence
  Description of Artificial Sequence: Synthetic peptide
VTIYYGVPVW

SEQ ID NO: 12600 - protein, 10 aa, Artificial Sequence
  Description of Artificial Sequence: Synthetic peptide
TTNVPWNSSW

SEQ ID NO: 12601 - protein, 9 aa, Artificial Sequence
  Description of Artificial Sequence: Synthetic peptide
FSVPLDKEF

SEQ ID NO: 12602 - protein, 11 aa, Artificial Sequence
  Description of Artificial Sequence: Synthetic peptide
SVLSGGKLDAW

SEQ ID NO: 12603 - protein, 9 aa, Artificial Sequence
  Description of Artificial Sequence: Synthetic peptide
KIKQIINMW

SEQ ID NO: 12604 - protein, 9 aa, Artificial Sequence
  Description of Artificial Sequence: Synthetic peptide
WSKSSIVGW

SEQ ID NO: 12605 - protein, 10 aa, Artificial Sequence
  Description of Artificial Sequence: Synthetic peptide
VTVYYGVPVW

SEQ ID NO: 12606 - protein, 9 aa, Artificial Sequence
  Description of Artificial Sequence: Synthetic peptide
KTAVQMAVF

SEQ ID NO: 12607 - protein, 9 aa, Artificial Sequence
  Description of Artificial Sequence: Synthetic peptide
ATAIAVAEW

SEQ ID NO: 12608 - protein, 11 aa, Artificial Sequence
  Description of Artificial Sequence: Synthetic peptide
KSIRIGPGQSF

SEQ ID NO: 12609 - protein, 9 aa, Artificial Sequence
  Description of Artificial Sequence: Synthetic peptide
STLQEQIQW

SEQ ID NO: 12610 - protein, 10 aa, Artificial Sequence
  Description of Artificial Sequence: Synthetic peptide
TAATNPDLAW

SEQ ID NO: 12611 - protein, 9 aa, Artificial Sequence
  Description of Artificial Sequence: Synthetic peptide
RAVAIGAVF

SEQ ID NO: 12612 - protein, 11 aa, Artificial Sequence
  Description of Artificial Sequence: Synthetic peptide
KTIHTDNGTNF

SEQ ID NO: 12613 - protein, 10 aa, Artificial Sequence
  Description of Artificial Sequence: Synthetic peptide
TAEKGVSQNY

SEQ ID NO: 12614 - protein, 9 aa, Artificial Sequence
  Description of Artificial Sequence: Synthetic peptide
KGSPAIFQY

SEQ ID NO: 12615 - protein, 10 aa, Artificial Sequence
  Description of Artificial Sequence: Synthetic peptide
AADKGVSQNY

SEQ ID NO: 12616 - protein, 8 aa, Artificial Sequence
  Description of Artificial Sequence: Synthetic peptide
TAIAVAEW

SEQ ID NO: 12617 - protein, 11 aa, Artificial Sequence
  Description of Artificial Sequence: Synthetic peptide
KSIHLGPGQAF

SEQ ID NO: 12618 - protein, 9 aa, Artificial Sequence
  Description of Artificial Sequence: Synthetic peptide
KTKPPLPSV

SEQ ID NO: 12619 - protein, 9 aa, Artificial Sequence
  Description of Artificial Sequence: Synthetic peptide
VAVHVASEY

SEQ ID NO: 12620 - protein, 9 aa, Artificial Sequence
  Description of Artificial Sequence: Synthetic peptide
AATNPDLAW

SEQ ID NO: 12621 - protein, 9 aa, Artificial Sequence
  Description of Artificial Sequence: Synthetic peptide
GSEELKSLY

SEQ ID NO: 12622 - protein, 9 aa, Artificial Sequence
  Description of Artificial Sequence: Synthetic peptide
RSVRLVNGF

SEQ ID NO: 12623 - protein, 9 aa, Artificial Sequence
  Description of Artificial Sequence: Synthetic peptide
RSVRLVTGF

SEQ ID NO: 12624 - protein, 9 aa, Artificial Sequence
  Description of Artificial Sequence: Synthetic peptide
RAVGIGALF

SEQ ID NO: 12625 - protein, 9 aa, Artificial Sequence
  Description of Artificial Sequence: Synthetic peptide
KALGPGATL

SEQ ID NO: 12626 - protein, 9 aa, Artificial Sequence
  Description of Artificial Sequence: Synthetic peptide
AAVDLSHFL

SEQ ID NO: 12627 - protein, 9 aa, Artificial Sequence
  Description of Artificial Sequence: Synthetic peptide
KAAVDLSHF

SEQ ID NO: 12628 - protein, 8 aa, Artificial Sequence
  Description of Artificial Sequence: Synthetic peptide
GQGVSIEW

SEQ ID NO: 12629 - protein, 9 aa, Artificial Sequence
  Description of Artificial Sequence: Synthetic peptide
RAIEAQQHL

SEQ ID NO: 12630 - protein, 10 aa, Artificial Sequence
  Description of Artificial Sequence: Synthetic peptide
RAIEAQQHLL

SEQ ID NO: 12631 - protein, 9 aa, Artificial Sequence
  Description of Artificial Sequence: Synthetic peptide
KTAVQMAVF

SEQ ID NO: 12632 - protein, 9 aa, Artificial Sequence
  Description of Artificial Sequence: Synthetic peptide
TINEEAAEW

SEQ ID NO: 12633 - protein, 9 aa, Artificial Sequence
  Description of Artificial Sequence: Synthetic peptide
FIPGDVNNL

SEQ ID NO: 12634 - protein, 9 aa, Artificial Sequence
  Description of Artificial Sequence: Synthetic peptide
FIPGDINNL

SEQ ID NO: 12635 - protein, 8 aa, Artificial Sequence
  Description of Artificial Sequence: Synthetic peptide
VSPASREL

SEQ ID NO: 12636 - protein, 9 aa, Artificial Sequence
  Description of Artificial Sequence: Synthetic peptide
HIPLETAEL

SEQ ID NO: 12637 - protein, 8 aa, Artificial Sequence
  Description of Artificial Sequence: Synthetic peptide
NSPASGEL

SEQ ID NO: 12638 - protein, 9 aa, Artificial Sequence
  Description of Artificial Sequence: Synthetic peptide
YSPVGILDI

SEQ ID NO: 12639 - protein, 9 aa, Artificial Sequence
  Description of Artificial Sequence: Synthetic peptide
FISGDINNL

SEQ ID NO: 12640 - protein, 9 aa, Artificial Sequence
  Description of Artificial Sequence: Synthetic peptide
YFPNATIKF

SEQ ID NO: 12641 - protein, 10 aa, Artificial Sequence
  Description of Artificial Sequence: Synthetic peptide
TVPNNGTITL

SEQ ID NO: 12642 - protein, 9 aa, Artificial Sequence
  Description of Artificial Sequence: Synthetic peptide
YSPLSLQTL

SEQ ID NO: 12643 - protein, 9 aa, Artificial Sequence
  Description of Artificial Sequence: Synthetic peptide
YSPVSILDI

SEQ ID NO: 12644 - protein, 8 aa, Artificial Sequence
  Description of Artificial Sequence: Synthetic peptide
NSPTSREL

SEQ ID NO: 12645 - protein, 9 aa, Artificial Sequence
  Description of Artificial Sequence: Synthetic peptide
VAVHVASEY

SEQ ID NO: 12646 - protein, 9 aa, Artificial Sequence
  Description of Artificial Sequence: Synthetic peptide
FISGDINNL

SEQ ID NO: 12647 - protein, 9 aa, Artificial Sequence
  Description of Artificial Sequence: Synthetic peptide
AAVDLSHFL

SEQ ID NO: 12648 - protein, 10 aa, Artificial Sequence
  Description of Artificial Sequence: Synthetic peptide
TAEKGVSQNY

SEQ ID NO: 12649 - protein, 10 aa, Artificial Sequence
  Description of Artificial Sequence: Synthetic peptide
AADKGVSQNY

SEQ ID NO: 12650 - protein, 9 aa, Artificial Sequence
  Description of Artificial Sequence: Synthetic peptide
TTKGLGISY

SEQ ID NO: 12651 - protein, 9 aa, Artificial Sequence
  Description of Artificial Sequence: Synthetic peptide
ATKGLGISY

SEQ ID NO: 12652 - protein, 8 aa, Artificial Sequence
  Description of Artificial Sequence: Synthetic peptide
AELVITTY

SEQ ID NO: 12653 - protein, 9 aa, Artificial Sequence
  Description of Artificial Sequence: Synthetic peptide
GSEELKSLY

SEQ ID NO: 12654 - protein, 9 aa, Artificial Sequence
  Description of Artificial Sequence: Synthetic peptide
TAELVITTY

SEQ ID NO: 12655 - protein, 9 aa, Artificial Sequence
  Description of Artificial Sequence: Synthetic peptide
EAKLVVTTY

SEQ ID NO: 12656 - protein, 9 aa, Artificial Sequence
  Description of Artificial Sequence: Synthetic peptide
EAELVITTY

SEQ ID NO: 12657 - protein, 8 aa, Artificial Sequence
  Description of Artificial Sequence: Synthetic peptide
VLDVGDAY

SEQ ID NO: 12658 - protein, 9 aa, Artificial Sequence
  Description of Artificial Sequence: Synthetic peptide
FISGDINNL

SEQ ID NO: 12659 - protein, 10 aa, Artificial Sequence
  Description of Artificial Sequence: Synthetic peptide
FAIDPGLLET

SEQ ID NO: 12660 - protein, 9 aa, Artificial Sequence
  Description of Artificial Sequence: Synthetic peptide
LALDKWASL

SEQ ID NO: 12661 - protein, 9 aa, Artificial Sequence
  Description of Artificial Sequence: Synthetic peptide
KALGPGATL

SEQ ID NO: 12662 - protein, 9 aa, Artificial Sequence
  Description of Artificial Sequence: Synthetic peptide
AAVDLSHFL

SEQ ID NO: 12663 - protein, 9 aa, Artificial Sequence
  Description of Artificial Sequence: Synthetic peptide
RAIEAQQHL

SEQ ID NO: 12664 - protein, 9 aa, Artificial Sequence
  Description of Artificial Sequence: Synthetic peptide
FISGDINNL

SEQ ID NO: 12665 - protein, 9 aa, Artificial Sequence
  Description of Artificial Sequence: Synthetic peptide
AVSPASREL

SEQ ID NO: 12666 - protein, 10 aa, Artificial Sequence
  Description of Artificial Sequence: Synthetic peptide
FAIDPGLLET

SEQ ID NO: 12667 - protein, 9 aa, Artificial Sequence
  Description of Artificial Sequence: Synthetic peptide
FIPGDINNL

SEQ ID NO: 12668 - protein, 9 aa, Artificial Sequence
  Description of Artificial Sequence: Synthetic peptide
KALGTGATL

SEQ ID NO: 12669 - protein, 9 aa, Artificial Sequence
  Description of Artificial Sequence: Synthetic peptide
FIPGDVNNL

SEQ ID NO: 12670 - protein, 9 aa, Artificial Sequence
  Description of Artificial Sequence: Synthetic peptide
ISMEPRTVL

SEQ ID NO: 12671 - protein, 9 aa, Artificial Sequence
  Description of Artificial Sequence: Synthetic peptide
GAVDLSHFL

SEQ ID NO: 12672 - protein, 9 aa, Artificial Sequence
  Description of Artificial Sequence: Synthetic peptide
KALGPGATL

SEQ ID NO: 12673 - protein, 9 aa, Artificial Sequence
  Description of Artificial Sequence: Synthetic peptide
AAVDLSHFL

SEQ ID NO: 12674 - protein, 9 aa, Artificial Sequence
  Description of Artificial Sequence: Synthetic peptide
YVDRFFKTL

SEQ ID NO: 12675 - protein, 9 aa, Artificial Sequence
  Description of Artificial Sequence: Synthetic peptide
RAIEAQQHL

SEQ ID NO: 12676 - protein, 9 aa, Artificial Sequence
  Description of Artificial Sequence: Synthetic peptide
ATDIQTKEL

SEQ ID NO: 12677 - protein, 9 aa, Artificial Sequence
  Description of Artificial Sequence: Synthetic peptide
QYDNILIEI

SEQ ID NO: 12678 - protein, 8 aa, Artificial Sequence
  Description of Artificial Sequence: Synthetic peptide
HTDNGTNF

SEQ ID NO: 12679 - protein, 9 aa, Artificial Sequence
  Description of Artificial Sequence: Synthetic peptide
QYDSILIEI

SEQ ID NO: 12680 - protein, 9 aa, Artificial Sequence
  Description of Artificial Sequence: Synthetic peptide
QYDHILIEI

SEQ ID NO: 12681 - protein, 8 aa, Artificial Sequence
  Description of Artificial Sequence: Synthetic peptide
HTDNGTNF

SEQ ID NO: 12682 - protein, 8 aa, Artificial Sequence
  Description of Artificial Sequence: Synthetic peptide
TVDDIQKL

SEQ ID NO: 12683 - protein, 9 aa, Artificial Sequence
  Description of Artificial Sequence: Synthetic peptide
STDIQTREL

SEQ ID NO: 12684 - protein, 8 aa, Artificial Sequence
  Description of Artificial Sequence: Synthetic peptide
LSDQSSTL

SEQ ID NO: 12685 - protein, 9 aa, Artificial Sequence
  Description of Artificial Sequence: Synthetic peptide
ISDNAKTII

SEQ ID NO: 12686 - protein, 9 aa, Artificial Sequence
  Description of Artificial Sequence: Synthetic peptide
IQDNSEIKI

SEQ ID NO: 12687 - protein, 9 aa, Artificial Sequence
  Description of Artificial Sequence: Synthetic peptide
ATDIQTREL

SEQ ID NO: 12688 - protein, 9 aa, Artificial Sequence
  Description of Artificial Sequence: Synthetic peptide
KAELQAIQL

SEQ ID NO: 12689 - protein, 9 aa, Artificial Sequence
  Description of Artificial Sequence: Synthetic peptide
IQDNSEIKV

SEQ ID NO: 12690 - protein, 8 aa, Artificial Sequence
  Description of Artificial Sequence: Synthetic peptide
AVDLSHFL

SEQ ID NO: 12691 - protein, 8 aa, Artificial Sequence
  Description of Artificial Sequence: Synthetic peptide
HTDNGSNF

SEQ ID NO: 12692 - protein, 9 aa, Artificial Sequence
  Description of Artificial Sequence: Synthetic peptide
VLDVGDAYF

SEQ ID NO: 12693 - protein, 9 aa, Artificial Sequence
  Description of Artificial Sequence: Synthetic peptide
IRAISERIL

SEQ ID NO: 12694 - protein, 9 aa, Artificial Sequence
  Description of Artificial Sequence: Synthetic peptide
QRPLVTIRV

SEQ ID NO: 12695 - protein, 9 aa, Artificial Sequence
  Description of Artificial Sequence: Synthetic peptide
IRSISERIL

SEQ ID NO: 12696 - protein, 8 aa, Artificial Sequence
  Description of Artificial Sequence: Synthetic peptide
YKGPRRFI

SEQ ID NO: 12697 - protein, 9 aa, Artificial Sequence
  Description of Artificial Sequence: Synthetic peptide
QRPLVTIKI

SEQ ID NO: 12698 - protein, 9 aa, Artificial Sequence
  Description of Artificial Sequence: Synthetic peptide
TRNPDIVIY

SEQ ID NO: 12699 - protein, 9 aa, Artificial Sequence
  Description of Artificial Sequence: Synthetic peptide
NATTTNDTL

SEQ ID NO: 12700 - protein, 9 aa, Artificial Sequence
  Description of Artificial Sequence: Synthetic peptide
FISGDINNL

SEQ ID NO: 12701 - protein, 9 aa, Artificial Sequence
  Description of Artificial Sequence: Synthetic peptide
FLSAAGSTM

SEQ ID NO: 12702 - protein, 9 aa, Artificial Sequence
  Description of Artificial Sequence: Synthetic peptide
EVKLVITTY

SEQ ID NO: 12703 - protein, 9 aa, Artificial Sequence
  Description of Artificial Sequence: Synthetic peptide
HLGPGQTFY

SEQ ID NO: 12704 - protein, 9 aa, Artificial Sequence
  Description of Artificial Sequence: Synthetic peptide
HLGPGQAFY

SEQ ID NO: 12705 - protein, 9 aa, Artificial Sequence
  Description of Artificial Sequence: Synthetic peptide
FPNNTAIKF

SEQ ID NO: 12706 - protein, 9 aa, Artificial Sequence
  Description of Artificial Sequence: Synthetic peptide
HCNVSGTQW

SEQ ID NO: 12707 - protein, 9 aa, Artificial Sequence
  Description of Artificial Sequence: Synthetic peptide
TQWNNTLEY

SEQ ID NO: 12708 - protein, 9 aa, Artificial Sequence
  Description of Artificial Sequence: Synthetic peptide
EAKLVVTTY

SEQ ID NO: 12709 - protein, 9 aa, Artificial Sequence
  Description of Artificial Sequence: Synthetic peptide
GLFNESEKY

SEQ ID NO: 12710 - protein, 9 aa, Artificial Sequence
  Description of Artificial Sequence: Synthetic peptide
FIPGDINNL

SEQ ID NO: 12711 - protein, 9 aa, Artificial Sequence
  Description of Artificial Sequence: Synthetic peptide
SQANTTIMM

SEQ ID NO: 12712 - protein, 9 aa, Artificial Sequence
  Description of Artificial Sequence: Synthetic peptide
TTKGLGISY

SEQ ID NO: 12713 - protein, 9 aa, Artificial Sequence
  Description of Artificial Sequence: Synthetic peptide
TLSDQSSTL

SEQ ID NO: 12714 - protein, 9 aa, Artificial Sequence
  Description of Artificial Sequence: Synthetic peptide
HCNISGTQW

SEQ ID NO: 12715 - protein, 9 aa, Artificial Sequence
  Description of Artificial Sequence: Synthetic peptide
FIPGDVNNL

SEQ ID NO: 12716 - protein, 11 aa, Artificial Sequence
  Description of Artificial Sequence: Synthetic peptide
TQIDPDLADQL

SEQ ID NO: 12717 - protein, 9 aa, Artificial Sequence
  Description of Artificial Sequence: Synthetic peptide
GAVDLSHFL

SEQ ID NO: 12718 - protein, 9 aa, Artificial Sequence
  Description of Artificial Sequence: Synthetic peptide
AAVDLSHFL

SEQ ID NO: 12719 - protein, 9 aa, Artificial Sequence
  Description of Artificial Sequence: Synthetic peptide
FLGAAGSTM

SEQ ID NO: 12720 - protein, 9 aa, Artificial Sequence
  Description of Artificial Sequence: Synthetic peptide
TVLDVGDAY

SEQ ID NO: 12721 - protein, 9 aa, Artificial Sequence
  Description of Artificial Sequence: Synthetic peptide
IVTDSQYAL

SEQ ID NO: 12722 - protein, 8 aa, Artificial Sequence
  Description of Artificial Sequence: Synthetic peptide
LSDQSSTL

SEQ ID NO: 12723 - protein, 9 aa, Artificial Sequence
  Description of Artificial Sequence: Synthetic peptide
STDIQTREL

SEQ ID NO: 12724 - protein, 9 aa, Artificial Sequence
  Description of Artificial Sequence: Synthetic peptide
GTDRVIEAL

SEQ ID NO: 12725 - protein, 8 aa, Artificial Sequence
  Description of Artificial Sequence: Synthetic peptide
VTDTKEAL

SEQ ID NO: 12726 - protein, 9 aa, Artificial Sequence
  Description of Artificial Sequence: Synthetic peptide
WTDRVIEAL

SEQ ID NO: 12727 - protein, 8 aa, Artificial Sequence
  Description of Artificial Sequence: Synthetic peptide
TVDDIQKL

SEQ ID NO: 12728 - protein, 9 aa, Artificial Sequence
  Description of Artificial Sequence: Synthetic peptide
IIDIISTDI

SEQ ID NO: 12729 - protein, 9 aa, Artificial Sequence
  Description of Artificial Sequence: Synthetic peptide
AADDLWVTI

SEQ ID NO: 12730 - protein, 8 aa, Artificial Sequence
  Description of Artificial Sequence: Synthetic peptide
HTDNGTNF

SEQ ID NO: 12731 - protein, 10 aa, Artificial Sequence
  Description of Artificial Sequence: Synthetic peptide
HQDPVPKQPL

SEQ ID NO: 12732 - protein, 9 aa, Artificial Sequence
  Description of Artificial Sequence: Synthetic peptide
ISDNAKTII

SEQ ID NO: 12733 - protein, 9 aa, Artificial Sequence
  Description of Artificial Sequence: Synthetic peptide
FISGDINNL

SEQ ID NO: 12734 - protein, 9 aa, Artificial Sequence
  Description of Artificial Sequence: Synthetic peptide
ATDIQTREL

SEQ ID NO: 12735 - protein, 9 aa, Artificial Sequence
  Description of Artificial Sequence: Synthetic peptide
GTDRVIEVL

SEQ ID NO: 12736 - protein, 9 aa, Artificial Sequence
  Description of Artificial Sequence: Synthetic peptide
KAELQAIQL

SEQ ID NO: 12737 - protein, 8 aa, Artificial Sequence
  Description of Artificial Sequence: Synthetic peptide
AVDLSHFL

SEQ ID NO: 12738 - protein, 9 aa, Artificial Sequence
  Description of Artificial Sequence: Synthetic peptide
ATDIQTKEL

SEQ ID NO: 12739 - protein, 9 aa, Artificial Sequence
  Description of Artificial Sequence: Synthetic peptide
TQDFWEVQL

SEQ ID NO: 12740 - protein, 9 aa, Artificial Sequence
  Description of Artificial Sequence: Synthetic peptide
GQYPPLASL

SEQ ID NO: 12741 - protein, 8 aa, Artificial Sequence
  Description of Artificial Sequence: Synthetic peptide
GQMVHQSL

SEQ ID NO: 12742 - protein, 9 aa, Artificial Sequence
  Description of Artificial Sequence: Synthetic peptide
KALGTGATL

SEQ ID NO: 12743 - protein, 9 aa, Artificial Sequence
  Description of Artificial Sequence: Synthetic peptide
YAAPIAGNI

SEQ ID NO: 12744 - protein, 9 aa, Artificial Sequence
  Description of Artificial Sequence: Synthetic peptide
ATKGLGISY

SEQ ID NO: 12745 - protein, 9 aa, Artificial Sequence
  Description of Artificial Sequence: Synthetic peptide
NAKTIIVHL

SEQ ID NO: 12746 - protein, 9 aa, Artificial Sequence
  Description of Artificial Sequence: Synthetic peptide
KAKPPLPSV

SEQ ID NO: 12747 - protein, 9 aa, Artificial Sequence
  Description of Artificial Sequence: Synthetic peptide
AAVDLSHFL

SEQ ID NO: 12748 - protein, 9 aa, Artificial Sequence
  Description of Artificial Sequence: Synthetic peptide
GAASITLTV

SEQ ID NO: 12749 - protein, 9 aa, Artificial Sequence
  Description of Artificial Sequence: Synthetic peptide
YFPNATIKF

SEQ ID NO: 12750 - protein, 9 aa, Artificial Sequence
  Description of Artificial Sequence: Synthetic peptide
IYQNPFKNL

SEQ ID NO: 12751 - protein, 10 aa, Artificial Sequence
  Description of Artificial Sequence: Synthetic peptide
SFISGDINNL

SEQ ID NO: 12752 - protein, 9 aa, Artificial Sequence
  Description of Artificial Sequence: Synthetic peptide
TYQIYREPF

SEQ ID NO: 12753 - protein, 9 aa, Artificial Sequence
  Description of Artificial Sequence: Synthetic peptide
KYLGNIIQY

SEQ ID NO: 12754 - protein, 9 aa, Artificial Sequence
  Description of Artificial Sequence: Synthetic peptide
TYQIYQNPF

SEQ ID NO: 12755 - protein, 9 aa, Artificial Sequence
  Description of Artificial Sequence: Synthetic peptide
KYLGNLTQY

SEQ ID NO: 12756 - protein, 10 aa, Artificial Sequence
  Description of Artificial Sequence: Synthetic peptide
SYFPNATIKF

SEQ ID NO: 12757 - protein, 10 aa, Artificial Sequence
  Description of Artificial Sequence: Synthetic peptide
IYPGIKVRPL

SEQ ID NO: 12758 - protein, 9 aa, Artificial Sequence
  Description of Artificial Sequence: Synthetic peptide
LYNTIAVLY

SEQ ID NO: 12759 - protein, 8 aa, Artificial Sequence
  Description of Artificial Sequence: Synthetic peptide
NYPIVQNL

SEQ ID NO: 12760 - protein, 8 aa, Artificial Sequence
  Description of Artificial Sequence: Synthetic peptide
VYHTQGYF

SEQ ID NO: 12761 - protein, 9 aa, Artificial Sequence
  Description of Artificial Sequence: Synthetic peptide
IYQEPFKNL

SEQ ID NO: 12762 - protein, 9 aa, Artificial Sequence
  Description of Artificial Sequence: Synthetic peptide
TYQIYQEPF

SEQ ID NO: 12763 - protein, 10 aa, Artificial Sequence
  Description of Artificial Sequence: Synthetic peptide
GFLGAAGSTM

SEQ ID NO: 12764 - protein, 9 aa, Artificial Sequence
  Description of Artificial Sequence: Synthetic peptide
KYLGNLTQY

SEQ ID NO: 12765 - protein, 9 aa, Artificial Sequence
  Description of Artificial Sequence: Synthetic peptide
IYQNPFKNL

SEQ ID NO: 12766 - protein, 9 aa, Artificial Sequence
  Description of Artificial Sequence: Synthetic peptide
KYLGNIIQY

SEQ ID NO: 12767 - protein, 9 aa, Artificial Sequence
  Description of Artificial Sequence: Synthetic peptide
TYQIYQNPF

SEQ ID NO: 12768 - protein, 9 aa, Artificial Sequence
  Description of Artificial Sequence: Synthetic peptide
YFPNATIKF

SEQ ID NO: 12769 - protein, 8 aa, Artificial Sequence
  Description of Artificial Sequence: Synthetic peptide
LYNTIAVL

SEQ ID NO: 12770 - protein, 9 aa, Artificial Sequence
  Description of Artificial Sequence: Synthetic peptide
IYQEPFKNL

SEQ ID NO: 12771 - protein, 10 aa, Artificial Sequence
  Description of Artificial Sequence: Synthetic peptide
GFLGAAGSTM

SEQ ID NO: 12772 - protein, 9 aa, Artificial Sequence
  Description of Artificial Sequence: Synthetic peptide
TYQIYQEPF

SEQ ID NO: 12773 - protein, 9 aa, Artificial Sequence
  Description of Artificial Sequence: Synthetic peptide
YSNTIYRLI

SEQ ID NO: 12774 - protein, 9 aa, Artificial Sequence
  Description of Artificial Sequence: Synthetic peptide
RSISERILV

SEQ ID NO: 12775 - protein, 9 aa, Artificial Sequence
  Description of Artificial Sequence: Synthetic peptide
NSNITGLLL

SEQ ID NO: 12776 - protein, 10 aa, Artificial Sequence
  Description of Artificial Sequence: Synthetic peptide
KVVEIEPLGV

SEQ ID NO: 12777 - protein, 9 aa, Artificial Sequence
  Description of Artificial Sequence: Synthetic peptide
GAASITLTV

SEQ ID NO: 12778 - protein, 9 aa, Artificial Sequence
  Description of Artificial Sequence: Synthetic peptide
ANSPTSREL

SEQ ID NO: 12779 - protein, 9 aa, Artificial Sequence
  Description of Artificial Sequence: Synthetic peptide
KGSPAIFQY

SEQ ID NO: 12780 - protein, 10 aa, Artificial Sequence
  Description of Artificial Sequence: Synthetic peptide
FATKGLGISY

SEQ ID NO: 12781 - protein, 9 aa, Artificial Sequence
  Description of Artificial Sequence: Synthetic peptide
IARERHPEY

SEQ ID NO: 12782 - protein, 9 aa, Artificial Sequence
  Description of Artificial Sequence: Synthetic peptide
AAVDLSHFL

SEQ ID NO: 12783 - protein, 9 aa, Artificial Sequence
  Description of Artificial Sequence: Synthetic peptide
KGSPAIFQY

SEQ ID NO: 12784 - protein, 9 aa, Artificial Sequence
  Description of Artificial Sequence: Synthetic peptide
VAVHVASEY

SEQ ID NO: 12785 - protein, 9 aa, Artificial Sequence
  Description of Artificial Sequence: Synthetic peptide
AVSPASREL

SEQ ID NO: 12786 - protein, 9 aa, Artificial Sequence
  Description of Artificial Sequence: Synthetic peptide
SASAIRKAI

SEQ ID NO: 12787 - protein, 10 aa, Artificial Sequence
  Description of Artificial Sequence: Synthetic peptide
IATDIQTREL

SEQ ID NO: 12788 - protein, 9 aa, Artificial Sequence
  Description of Artificial Sequence: Synthetic peptide
KAKPPLPSV

SEQ ID NO: 12789 - protein, 9 aa, Artificial Sequence
  Description of Artificial Sequence: Synthetic peptide
AAVDLSHFL

SEQ ID NO: 12790 - protein, 9 aa, Artificial Sequence
  Description of Artificial Sequence: Synthetic peptide
RAIEAQQHL

SEQ ID NO: 12791 - protein, 9 aa, Artificial Sequence
  Description of Artificial Sequence: Synthetic peptide
ANSPTSREL

SEQ ID NO: 12792 - protein, 10 aa, Artificial Sequence
  Description of Artificial Sequence: Synthetic peptide
IATDIQTKEL

SEQ ID NO: 12793 - protein, 11 aa, Artificial Sequence
  Description of Artificial Sequence: Synthetic peptide
AEQASQDVKGW

SEQ ID NO: 12794 - protein, 9 aa, Artificial Sequence
  Description of Artificial Sequence: Synthetic peptide
VAVHVASEY

SEQ ID NO: 12795 - protein, 9 aa, Artificial Sequence
  Description of Artificial Sequence: Synthetic peptide
AEKGVSQNY

SEQ ID NO: 12796 - protein, 9 aa, Artificial Sequence
  Description of Artificial Sequence: Synthetic peptide
YAAPIAGNI

SEQ ID NO: 12797 - protein, 9 aa, Artificial Sequence
  Description of Artificial Sequence: Synthetic peptide
IRIGPGQSF

SEQ ID NO: 12798 - protein, 11 aa, Artificial Sequence
  Description of Artificial Sequence: Synthetic peptide
AEQATQEVKGW

SEQ ID NO: 12799 - protein, 11 aa, Artificial Sequence
  Description of Artificial Sequence: Synthetic peptide
AEQASQEVKNW

SEQ ID NO: 12800 - protein, 9 aa, Artificial Sequence
  Description of Artificial Sequence: Synthetic peptide
AAVDLSHFL

SEQ ID NO: 12801 - protein, 11 aa, Artificial Sequence
  Description of Artificial Sequence: Synthetic peptide
AEIQKQGQGQW

SEQ ID NO: 12802 - protein, 9 aa, Artificial Sequence
  Description of Artificial Sequence: Synthetic peptide
GAASITLTV

SEQ ID NO: 12803 - protein, 11 aa, Artificial Sequence
  Description of Artificial Sequence: Synthetic peptide
SEVNIVTDSQY

SEQ ID NO: 12804 - protein, 9 aa, Artificial Sequence
  Description of Artificial Sequence: Synthetic peptide
FISGDINNL

SEQ ID NO: 12805 - protein, 9 aa, Artificial Sequence
  Description of Artificial Sequence: Synthetic peptide
FIPGDVNNL

SEQ ID NO: 12806 - protein, 9 aa, Artificial Sequence
  Description of Artificial Sequence: Synthetic peptide
FIPGDINNL

SEQ ID NO: 12807 - protein, 8 aa, Artificial Sequence
  Description of Artificial Sequence: Synthetic peptide
VAIGAVFL

SEQ ID NO: 12808 - protein, 10 aa, Artificial Sequence
  Description of Artificial Sequence: Synthetic peptide
RAVAIGAVFL

SEQ ID NO: 12809 - protein, 9 aa, Artificial Sequence
  Description of Artificial Sequence: Synthetic peptide
GAVDLSHFL

SEQ ID NO: 12810 - protein, 9 aa, Artificial Sequence
  Description of Artificial Sequence: Synthetic peptide
AAVDLSHFL

SEQ ID NO: 12811 - protein, 10 aa, Artificial Sequence
  Description of Artificial Sequence: Synthetic peptide
AADKGVSQNY

SEQ ID NO: 12812 - protein, 9 aa, Artificial Sequence
  Description of Artificial Sequence: Synthetic peptide
ISERILTTY

SEQ ID NO: 12813 - protein, 9 aa, Artificial Sequence
  Description of Artificial Sequence: Synthetic peptide
GSEEIKSLY

SEQ ID NO: 12814 - protein, 9 aa, Artificial Sequence
  Description of Artificial Sequence: Synthetic peptide
GSEELKSLY

SEQ ID NO: 12815 - protein, 9 aa, Artificial Sequence
  Description of Artificial Sequence: Synthetic peptide
LADQLIHKY

SEQ ID NO: 12816 - protein, 8 aa, Artificial Sequence
  Description of Artificial Sequence: Synthetic peptide
VLDVGDAY

SEQ ID NO: 12817 - protein, 10 aa, Artificial Sequence
  Description of Artificial Sequence: Synthetic peptide
ATDDLWVTVY

SEQ ID NO: 12818 - protein, 9 aa, Artificial Sequence
  Description of Artificial Sequence: Synthetic peptide
SFDPIPIHY

SEQ ID NO: 12819 - protein, 10 aa, Artificial Sequence
  Description of Artificial Sequence: Synthetic peptide
VTVLDVGDAY

SEQ ID NO: 12820 - protein, 10 aa, Artificial Sequence
  Description of Artificial Sequence: Synthetic peptide
FTSKGLGISY

SEQ ID NO: 12821 - protein, 9 aa, Artificial Sequence
  Description of Artificial Sequence: Synthetic peptide
QLTEVVQKV

SEQ ID NO: 12822 - protein, 9 aa, Artificial Sequence
  Description of Artificial Sequence: Synthetic peptide
ILAEAMSQV

SEQ ID NO: 12823 - protein, 9 aa, Artificial Sequence
  Description of Artificial Sequence: Synthetic peptide
QLTEVVQKI

SEQ ID NO: 12824 - protein, 9 aa, Artificial Sequence
  Description of Artificial Sequence: Synthetic peptide
GLADQLIHL

SEQ ID NO: 12825 - protein, 9 aa, Artificial Sequence
  Description of Artificial Sequence: Synthetic peptide
AVLSVVNRV

SEQ ID NO: 12826 - protein, 10 aa, Artificial Sequence
  Description of Artificial Sequence: Synthetic peptide
ALTDVVPLTV

SEQ ID NO: 12827 - protein, 9 aa, Artificial Sequence
  Description of Artificial Sequence: Synthetic peptide
ILKEPVHGV

SEQ ID NO: 12828 - protein, 9 aa, Artificial Sequence
  Description of Artificial Sequence: Synthetic peptide
SLLETTEGC

SEQ ID NO: 12829 - protein, 9 aa, Artificial Sequence
  Description of Artificial Sequence: Synthetic peptide
AVLAVINRV

SEQ ID NO: 12830 - protein, 9 aa, Artificial Sequence
  Description of Artificial Sequence: Synthetic peptide
GLCTNVSTV

SEQ ID NO: 12831 - protein, 9 aa, Artificial Sequence
  Description of Artificial Sequence: Synthetic peptide
LLDRTAIAV

SEQ ID NO: 12832 - protein, 9 aa, Artificial Sequence
  Description of Artificial Sequence: Synthetic peptide
ALGEVGPLI

SEQ ID NO: 12833 - protein, 9 aa, Artificial Sequence
  Description of Artificial Sequence: Synthetic peptide
SLYNAVVVL

SEQ ID NO: 12834 - protein, 9 aa, Artificial Sequence
  Description of Artificial Sequence: Synthetic peptide
GLYPPLTSL

SEQ ID NO: 12835 - protein, 9 aa, Artificial Sequence
  Description of Artificial Sequence: Synthetic peptide
IIKEPVHGV

SEQ ID NO: 12836 - protein, 9 aa, Artificial Sequence
  Description of Artificial Sequence: Synthetic peptide
ALGEVGPFI

SEQ ID NO: 12837 - protein, 9 aa, Artificial Sequence
  Description of Artificial Sequence: Synthetic peptide
GLLETTEGC

SEQ ID NO: 12838 - protein, 9 aa, Artificial Sequence
  Description of Artificial Sequence: Synthetic peptide
ALTEICTEM

SEQ ID NO: 12839 - protein, 9 aa, Artificial Sequence
  Description of Artificial Sequence: Synthetic peptide
ILAEAMSKA

SEQ ID NO: 12840 - protein, 9 aa, Artificial Sequence
  Description of Artificial Sequence: Synthetic peptide
ALTDVVPLT

SEQ ID NO: 12841 - protein, 9 aa, Artificial Sequence
  Description of Artificial Sequence: Synthetic peptide
FIPGNINNL

SEQ ID NO: 12842 - protein, 10 aa, Artificial Sequence
  Description of Artificial Sequence: Synthetic peptide
ALTDVVPLTA

SEQ ID NO: 12843 - protein, 9 aa, Artificial Sequence
  Description of Artificial Sequence: Synthetic peptide
AVLSIINRV

SEQ ID NO: 12844 - protein, 10 aa, Artificial Sequence
  Description of Artificial Sequence: Synthetic peptide
SLLDRTAIAV

SEQ ID NO: 12845 - protein, 9 aa, Artificial Sequence
  Description of Artificial Sequence: Synthetic peptide
SLFNTIVVL

SEQ ID NO: 12846 - protein, 9 aa, Artificial Sequence
  Description of Artificial Sequence: Synthetic peptide
YQLETEPIL

SEQ ID NO: 12847 - protein, 9 aa, Artificial Sequence
  Description of Artificial Sequence: Synthetic peptide
IQDNNEIKV

SEQ ID NO: 12848 - protein, 9 aa, Artificial Sequence
  Description of Artificial Sequence: Synthetic peptide
IVTDSQYAL

SEQ ID NO: 12849 - protein, 10 aa, Artificial Sequence
  Description of Artificial Sequence: Synthetic peptide
KLVPVDPEEV

SEQ ID NO: 12850 - protein, 9 aa, Artificial Sequence
  Description of Artificial Sequence: Synthetic peptide
SLAEKNIII

SEQ ID NO: 12851 - protein, 9 aa, Artificial Sequence
  Description of Artificial Sequence: Synthetic peptide
ILAEAMSQV

SEQ ID NO: 12852 - protein, 9 aa, Artificial Sequence
  Description of Artificial Sequence: Synthetic peptide
ILKEPVHGV

SEQ ID NO: 12853 - protein, 9 aa, Artificial Sequence
  Description of Artificial Sequence: Synthetic peptide
QLTEVVQKV

SEQ ID NO: 12854 - protein, 9 aa, Artificial Sequence
  Description of Artificial Sequence: Synthetic peptide
FIPGNINNL

SEQ ID NO: 12855 - protein, 9 aa, Artificial Sequence
  Description of Artificial Sequence: Synthetic peptide
IIKEPVHGV

SEQ ID NO: 12856 - protein, 9 aa, Artificial Sequence
  Description of Artificial Sequence: Synthetic peptide
ILAEAMSKA

SEQ ID NO: 12857 - protein, 9 aa, Artificial Sequence
  Description of Artificial Sequence: Synthetic peptide
VVKIEPLGV

SEQ ID NO: 12858 - protein, 10 aa, Artificial Sequence
  Description of Artificial Sequence: Synthetic peptide
ALTDVVPLTV

SEQ ID NO: 12859 - protein, 9 aa, Artificial Sequence
  Description of Artificial Sequence: Synthetic peptide
QLTEVVQKI

SEQ ID NO: 12860 - protein, 9 aa, Artificial Sequence
  Description of Artificial Sequence: Synthetic peptide
GLCTNVSTV

SEQ ID NO: 12861 - protein, 9 aa, Artificial Sequence
  Description of Artificial Sequence: Synthetic peptide
GLYPPLTSL

SEQ ID NO: 12862 - protein, 9 aa, Artificial Sequence
  Description of Artificial Sequence: Synthetic peptide
VVRIEPVGV

SEQ ID NO: 12863 - protein, 9 aa, Artificial Sequence
  Description of Artificial Sequence: Synthetic peptide
QLQARILAV

SEQ ID NO: 12864 - protein, 9 aa, Artificial Sequence
  Description of Artificial Sequence: Synthetic peptide
KVKPPLPSV

SEQ ID NO: 12865 - protein, 10 aa, Artificial Sequence
  Description of Artificial Sequence: Synthetic peptide
YLKDQQLLGI

SEQ ID NO: 12866 - protein, 9 aa, Artificial Sequence
  Description of Artificial Sequence: Synthetic peptide
KIKPPLPSV

SEQ ID NO: 12867 - protein, 8 aa, Artificial Sequence
  Description of Artificial Sequence: Synthetic peptide
VLAVINRV

SEQ ID NO: 12868 - protein, 9 aa, Artificial Sequence
  Description of Artificial Sequence: Synthetic peptide
AVLSVVNRV

SEQ ID NO: 12869 - protein, 9 aa, Artificial Sequence
  Description of Artificial Sequence: Synthetic peptide
ALFYKLDVV

SEQ ID NO: 12870 - protein, 10 aa, Artificial Sequence
  Description of Artificial Sequence: Synthetic peptide
TLWNATLNRV

SEQ ID NO: 12871 - protein, 8 aa, Artificial Sequence
  Description of Artificial Sequence: Synthetic peptide
VLSVVNRV

SEQ ID NO: 12872 - protein, 9 aa, Artificial Sequence
  Description of Artificial Sequence: Synthetic peptide
AAAPGVGAV

SEQ ID NO: 12873 - protein, 11 aa, Artificial Sequence
  Description of Artificial Sequence: Synthetic peptide
FLKEKGGLEGL

SEQ ID NO: 12874 - protein, 10 aa, Artificial Sequence
  Description of Artificial Sequence: Synthetic peptide
ALTDVVPLTA

SEQ ID NO: 12875 - protein, 9 aa, Artificial Sequence
  Description of Artificial Sequence: Synthetic peptide
GAASITLTV

SEQ ID NO: 12876 - protein, 9 aa, Artificial Sequence
  Description of Artificial Sequence: Synthetic peptide
ALNPGLLET

SEQ ID NO: 12877 - protein, 11 aa, Artificial Sequence
  Description of Artificial Sequence: Synthetic peptide
FLKEKGGLDGL

SEQ ID NO: 12878 - protein, 9 aa, Artificial Sequence
  Description of Artificial Sequence: Synthetic peptide
TLWQRPLVA

SEQ ID NO: 12879 - protein, 9 aa, Artificial Sequence
  Description of Artificial Sequence: Synthetic peptide
TLNRVAAEV

SEQ ID NO: 12880 - protein, 9 aa, Artificial Sequence
  Description of Artificial Sequence: Synthetic peptide
GLADQLIHL

SEQ ID NO: 12881 - protein, 9 aa, Artificial Sequence
  Description of Artificial Sequence: Synthetic peptide
ALSPRTLNA

SEQ ID NO: 12882 - protein, 10 aa, Artificial Sequence
  Description of Artificial Sequence: Synthetic peptide
SLFDTIAIAV

SEQ ID NO: 12883 - protein, 9 aa, Artificial Sequence
  Description of Artificial Sequence: Synthetic peptide
TLNFPISSI

SEQ ID NO: 12884 - protein, 9 aa, Artificial Sequence
  Description of Artificial Sequence: Synthetic peptide
GLCRNVSTV

SEQ ID NO: 12885 - protein, 10 aa, Artificial Sequence
  Description of Artificial Sequence: Synthetic peptide
SLLDRTAIAV

SEQ ID NO: 12886 - protein, 9 aa, Artificial Sequence
  Description of Artificial Sequence: Synthetic peptide
ELKKIIGQV

SEQ ID NO: 12887 - protein, 9 aa, Artificial Sequence
  Description of Artificial Sequence: Synthetic peptide
AVLSIINRV

SEQ ID NO: 12888 - protein, 8 aa, Artificial Sequence
  Description of Artificial Sequence: Synthetic peptide
VLSIINRV

SEQ ID NO: 12889 - protein, 10 aa, Artificial Sequence
  Description of Artificial Sequence: Synthetic peptide
TLWNKTLEGV

SEQ ID NO: 12890 - protein, 9 aa, Artificial Sequence
  Description of Artificial Sequence: Synthetic peptide
TMIRILQQL

SEQ ID NO: 12891 - protein, 9 aa, Artificial Sequence
  Description of Artificial Sequence: Synthetic peptide
VAAEGVGKV

SEQ ID NO: 12892 - protein, 9 aa, Artificial Sequence
  Description of Artificial Sequence: Synthetic peptide
ALLTAVRTI

SEQ ID NO: 12893 - protein, 10 aa, Artificial Sequence
  Description of Artificial Sequence: Synthetic peptide
AMSQVTATSV

SEQ ID NO: 12894 - protein, 9 aa, Artificial Sequence
  Description of Artificial Sequence: Synthetic peptide
FIPGDINNL

SEQ ID NO: 12895 - protein, 10 aa, Artificial Sequence
  Description of Artificial Sequence: Synthetic peptide
KVVKIEPLGV

SEQ ID NO: 12896 - protein, 9 aa, Artificial Sequence
  Description of Artificial Sequence: Synthetic peptide
LLSCNTSTV

SEQ ID NO: 12897 - protein, 11 aa, Artificial Sequence
  Description of Artificial Sequence: Synthetic peptide
GLFIPGNINNL

SEQ ID NO: 12898 - protein, 9 aa, Artificial Sequence
  Description of Artificial Sequence: Synthetic peptide
AVLAVINRV

SEQ ID NO: 12899 - protein, 9 aa, Artificial Sequence
  Description of Artificial Sequence: Synthetic peptide
SLYNAVVVL

SEQ ID NO: 12900 - protein, 10 aa, Artificial Sequence
  Description of Artificial Sequence: Synthetic peptide
GLIGLRIVFA

SEQ ID NO: 12901 - protein, 9 aa, Artificial Sequence
  Description of Artificial Sequence: Synthetic peptide
RAAEGVGKV

SEQ ID NO: 12902 - protein, 9 aa, Artificial Sequence
  Description of Artificial Sequence: Synthetic peptide
SLYNTVAVL

SEQ ID NO: 12903 - protein, 9 aa, Artificial Sequence
  Description of Artificial Sequence: Synthetic peptide
TVLSIINRV

SEQ ID NO: 12904 - protein, 9 aa, Artificial Sequence
  Description of Artificial Sequence: Synthetic peptide
YAAPIAGQI

SEQ ID NO: 12905 - protein, 9 aa, Artificial Sequence
  Description of Artificial Sequence: Synthetic peptide
SLSPRTLNA

SEQ ID NO: 12906 - protein, 9 aa, Artificial Sequence
  Description of Artificial Sequence: Synthetic peptide
LLAVGISAL

SEQ ID NO: 12907 - protein, 9 aa, Artificial Sequence
  Description of Artificial Sequence: Synthetic peptide
SLAEKNIII

SEQ ID NO: 12908 - protein, 10 aa, Artificial Sequence
  Description of Artificial Sequence: Synthetic peptide
TLWNETLKNV

SEQ ID NO: 12909 - protein, 10 aa, Artificial Sequence
  Description of Artificial Sequence: Synthetic peptide
RLYERIIERA

SEQ ID NO: 12910 - protein, 10 aa, Artificial Sequence
  Description of Artificial Sequence: Synthetic peptide
HLRDFILIAA

SEQ ID NO: 12911 - protein, 9 aa, Artificial Sequence
  Description of Artificial Sequence: Synthetic peptide
SLFNTIVVL

SEQ ID NO: 12912 - protein, 10 aa, Artificial Sequence
  Description of Artificial Sequence: Synthetic peptide
KLVSTGIRKV

SEQ ID NO: 12913 - protein, 9 aa, Artificial Sequence
  Description of Artificial Sequence: Synthetic peptide
QLTEVVQKV

SEQ ID NO: 12914 - protein, 9 aa, Artificial Sequence
  Description of Artificial Sequence: Synthetic peptide
GLADQLIHL

SEQ ID NO: 12915 - protein, 9 aa, Artificial Sequence
  Description of Artificial Sequence: Synthetic peptide
FIPGNINNL

SEQ ID NO: 12916 - protein, 9 aa, Artificial Sequence
  Description of Artificial Sequence: Synthetic peptide
AVLSIINRV

SEQ ID NO: 12917 - protein, 9 aa, Artificial Sequence
  Description of Artificial Sequence: Synthetic peptide
SITNWLWYI

SEQ ID NO: 12918 - protein, 9 aa, Artificial Sequence
  Description of Artificial Sequence: Synthetic peptide
TVLSIINRV

SEQ ID NO: 12919 - protein, 9 aa, Artificial Sequence
  Description of Artificial Sequence: Synthetic peptide
SLFNTIVVL

SEQ ID NO: 12920 - protein, 9 aa, Artificial Sequence
  Description of Artificial Sequence: Synthetic peptide
AVLSVVNRV

SEQ ID NO: 12921 - protein, 9 aa, Artificial Sequence
  Description of Artificial Sequence: Synthetic peptide
AVLAVINRV

SEQ ID NO: 12922 - protein, 9 aa, Artificial Sequence
  Description of Artificial Sequence: Synthetic peptide
QLTEVVQKI

SEQ ID NO: 12923 - protein, 9 aa, Artificial Sequence
  Description of Artificial Sequence: Synthetic peptide
ILKEPVHGV

SEQ ID NO: 12924 - protein, 9 aa, Artificial Sequence
  Description of Artificial Sequence: Synthetic peptide
EVLKYLWNL

SEQ ID NO: 12925 - protein, 9 aa, Artificial Sequence
  Description of Artificial Sequence: Synthetic peptide
TITNWLWYI

SEQ ID NO: 12926 - protein, 9 aa, Artificial Sequence
  Description of Artificial Sequence: Synthetic peptide
GLYPPLTSL

SEQ ID NO: 12927 - protein, 9 aa, Artificial Sequence
  Description of Artificial Sequence: Synthetic peptide
ILAIIVWTI

SEQ ID NO: 12928 - protein, 10 aa, Artificial Sequence
  Description of Artificial Sequence: Synthetic peptide
ALTDVVPLTV

SEQ ID NO: 12929 - protein, 9 aa, Artificial Sequence
  Description of Artificial Sequence: Synthetic peptide
IVNQIIEQL

SEQ ID NO: 12930 - protein, 9 aa, Artificial Sequence
  Description of Artificial Sequence: Synthetic peptide
SLYNAVVVL

SEQ ID NO: 12931 - protein, 10 aa, Artificial Sequence
  Description of Artificial Sequence: Synthetic peptide
SLLDRTAIAV

SEQ ID NO: 12932 - protein, 9 aa, Artificial Sequence
  Description of Artificial Sequence: Synthetic peptide
ALLTAVRTI

SEQ ID NO: 12933 - protein, 9 aa, Artificial Sequence
  Description of Artificial Sequence: Synthetic peptide
TLNAWVKVI

SEQ ID NO: 12934 - protein, 11 aa, Artificial Sequence
  Description of Artificial Sequence: Synthetic peptide
GLFIPGNINNL

SEQ ID NO: 12935 - protein, 9 aa, Artificial Sequence
  Description of Artificial Sequence: Synthetic peptide
KQQALFYRL

SEQ ID NO: 12936 - protein, 10 aa, Artificial Sequence
  Description of Artificial Sequence: Synthetic peptide
TLWQRPLVTI

SEQ ID NO: 12937 - protein, 9 aa, Artificial Sequence
  Description of Artificial Sequence: Synthetic peptide
IIKEPVHGV

SEQ ID NO: 12938 - protein, 9 aa, Artificial Sequence
  Description of Artificial Sequence: Synthetic peptide
FQLPPLERL

SEQ ID NO: 12939 - protein, 9 aa, Artificial Sequence
  Description of Artificial Sequence: Synthetic peptide
LVNQIIEQL

SEQ ID NO: 12940 - protein, 10 aa, Artificial Sequence
  Description of Artificial Sequence: Synthetic peptide
SLFDTIAIAV

SEQ ID NO: 12941 - protein, 9 aa, Artificial Sequence
  Description of Artificial Sequence: Synthetic peptide
AIVAYIVAI

SEQ ID NO: 12942 - protein, 9 aa, Artificial Sequence
  Description of Artificial Sequence: Synthetic peptide
KIKPPLPSV

SEQ ID NO: 12943 - protein, 9 aa, Artificial Sequence
  Description of Artificial Sequence: Synthetic peptide
ILAEAMSQV

SEQ ID NO: 12944 - protein, 9 aa, Artificial Sequence
  Description of Artificial Sequence: Synthetic peptide
ALFYKLDVV

SEQ ID NO: 12945 - protein, 9 aa, Artificial Sequence
  Description of Artificial Sequence: Synthetic peptide
SLYNTVAVL

SEQ ID NO: 12946 - protein, 10 aa, Artificial Sequence
  Description of Artificial Sequence: Synthetic peptide
TLWNATLNRV

SEQ ID NO: 12947 - protein, 9 aa, Artificial Sequence
  Description of Artificial Sequence: Synthetic peptide
HLEGKIILV

SEQ ID NO: 12948 - protein, 9 aa, Artificial Sequence
  Description of Artificial Sequence: Synthetic peptide
IITIIVWTI

SEQ ID NO: 12949 - protein, 9 aa, Artificial Sequence
  Description of Artificial Sequence: Synthetic peptide
LQLPLLEKL

SEQ ID NO: 12950 - protein, 9 aa, Artificial Sequence
  Description of Artificial Sequence: Synthetic peptide
QLQARILAV

SEQ ID NO: 12951 - protein, 10 aa, Artificial Sequence
  Description of Artificial Sequence: Synthetic peptide
NLAQYWGQEL

SEQ ID NO: 12952 - protein, 9 aa, Artificial Sequence
  Description of Artificial Sequence: Synthetic peptide
ALGEVGPLI

SEQ ID NO: 12953 - protein, 9 aa, Artificial Sequence
  Description of Artificial Sequence: Synthetic peptide
RLYERIIER

SEQ ID NO: 12954 - protein, 9 aa, Artificial Sequence
  Description of Artificial Sequence: Synthetic peptide
SITRWLWYI

SEQ ID NO: 12955 - protein, 9 aa, Artificial Sequence
  Description of Artificial Sequence: Synthetic peptide
ALTDVVPLT

SEQ ID NO: 12956 - protein, 9 aa, Artificial Sequence
  Description of Artificial Sequence: Synthetic peptide
VIWGKIPKF

SEQ ID NO: 12957 - protein, 9 aa, Artificial Sequence
  Description of Artificial Sequence: Synthetic peptide
AALDLSHFL

SEQ ID NO: 12958 - protein, 9 aa, Artificial Sequence
  Description of Artificial Sequence: Synthetic peptide
KVKPPLPSV

SEQ ID NO: 12959 - protein, 10 aa, Artificial Sequence
  Description of Artificial Sequence: Synthetic peptide
TLWQRPLVAI

SEQ ID NO: 12960 - protein, 9 aa, Artificial Sequence
  Description of Artificial Sequence: Synthetic peptide
GVQAIIRTL

SEQ ID NO: 12961 - protein, 9 aa, Artificial Sequence
  Description of Artificial Sequence: Synthetic peptide
TLNRVAAEV

SEQ ID NO: 12962 - protein, 11 aa, Artificial Sequence
  Description of Artificial Sequence: Synthetic peptide
VLFQLPPLERL

SEQ ID NO: 12963 - protein, 9 aa, Artificial Sequence
  Description of Artificial Sequence: Synthetic peptide
LLNTTAIVV

SEQ ID NO: 12964 - protein, 9 aa, Artificial Sequence
  Description of Artificial Sequence: Synthetic peptide
TMIRILQQL

SEQ ID NO: 12965 - protein, 9 aa, Artificial Sequence
  Description of Artificial Sequence: Synthetic peptide
MIIGSLIGL

SEQ ID NO: 12966 - protein, 9 aa, Artificial Sequence
  Description of Artificial Sequence: Synthetic peptide
VIWGKVPKF

SEQ ID NO: 12967 - protein, 9 aa, Artificial Sequence
  Description of Artificial Sequence: Synthetic peptide
IVTDSQYAL

SEQ ID NO: 12968 - protein, 9 aa, Artificial Sequence
  Description of Artificial Sequence: Synthetic peptide
FIPGDINNL

SEQ ID NO: 12969 - protein, 11 aa, Artificial Sequence
  Description of Artificial Sequence: Synthetic peptide
FLKEKGGLEGL

SEQ ID NO: 12970 - protein, 10 aa, Artificial Sequence
  Description of Artificial Sequence: Synthetic peptide
TLWNKTLEGV

SEQ ID NO: 12971 - protein, 9 aa, Artificial Sequence
  Description of Artificial Sequence: Synthetic peptide
ALGEVGPFI

SEQ ID NO: 12972 - protein, 9 aa, Artificial Sequence
  Description of Artificial Sequence: Synthetic peptide
GISALIVAL

SEQ ID NO: 12973 - protein, 9 aa, Artificial Sequence
  Description of Artificial Sequence: Synthetic peptide
ALNPGLLET

SEQ ID NO: 12974 - protein, 9 aa, Artificial Sequence
  Description of Artificial Sequence: Synthetic peptide
VIVAFIVAL

SEQ ID NO: 12975 - protein, 8 aa, Artificial Sequence
  Description of Artificial Sequence: Synthetic peptide
YTGTIYKL

SEQ ID NO: 12976 - protein, 9 aa, Artificial Sequence
  Description of Artificial Sequence: Synthetic peptide
LLQLTVWGI

SEQ ID NO: 12977 - protein, 9 aa, Artificial Sequence
  Description of Artificial Sequence: Synthetic peptide
LLDRTAIAV

SEQ ID NO: 12978 - protein, 9 aa, Artificial Sequence
  Description of Artificial Sequence: Synthetic peptide
TLQEQIAWM

SEQ ID NO: 12979 - protein, 9 aa, Artificial Sequence
  Description of Artificial Sequence: Synthetic peptide
AIIRILQQL

SEQ ID NO: 12980 - protein, 11 aa, Artificial Sequence
  Description of Artificial Sequence: Synthetic peptide
VQLGIPHPAGL

SEQ ID NO: 12981 - protein, 10 aa, Artificial Sequence
  Description of Artificial Sequence: Synthetic peptide
RTQDFWEVQL

SEQ ID NO: 12982 - protein, 9 aa, Artificial Sequence
  Description of Artificial Sequence: Synthetic peptide
YQLETEPIL

SEQ ID NO: 12983 - protein, 10 aa, Artificial Sequence
  Description of Artificial Sequence: Synthetic peptide
KLDDLEKIRL

SEQ ID NO: 12984 - protein, 10 aa, Artificial Sequence
  Description of Artificial Sequence: Synthetic peptide
RLQEPVRLQL

SEQ ID NO: 12985 - protein, 10 aa, Artificial Sequence
  Description of Artificial Sequence: Synthetic peptide
TLWQRPVVTI

SEQ ID NO: 12986 - protein, 9 aa, Artificial Sequence
  Description of Artificial Sequence: Synthetic peptide
YQSNPYPKL

SEQ ID NO: 12987 - protein, 9 aa, Artificial Sequence
  Description of Artificial Sequence: Synthetic peptide
TLQEQITWM

SEQ ID NO: 12988 - protein, 8 aa, Artificial Sequence
  Description of Artificial Sequence: Synthetic peptide
KILEPFRV

SEQ ID NO: 12989 - protein, 9 aa, Artificial Sequence
  Description of Artificial Sequence: Synthetic peptide
TINGTLWNA

SEQ ID NO: 12990 - protein, 9 aa, Artificial Sequence
  Description of Artificial Sequence: Synthetic peptide
IIVWTIVYL

SEQ ID NO: 12991 - protein, 9 aa, Artificial Sequence
  Description of Artificial Sequence: Synthetic peptide
LLAVGISAL

SEQ ID NO: 12992 - protein, 9 aa, Artificial Sequence
  Description of Artificial Sequence: Synthetic peptide
LTLGWCFKL

SEQ ID NO: 12993 - protein, 9 aa, Artificial Sequence
  Description of Artificial Sequence: Synthetic peptide
KLTPLCVTL

SEQ ID NO: 12994 - protein, 9 aa, Artificial Sequence
  Description of Artificial Sequence: Synthetic peptide
NTVAVLYYV

SEQ ID NO: 12995 - protein, 9 aa, Artificial Sequence
  Description of Artificial Sequence: Synthetic peptide
FIPGNINNL

SEQ ID NO: 12996 - protein, 9 aa, Artificial Sequence
  Description of Artificial Sequence: Synthetic peptide
QLTEVVQKV

SEQ ID NO: 12997 - protein, 9 aa, Artificial Sequence
  Description of Artificial Sequence: Synthetic peptide
FIPGDINNL

SEQ ID NO: 12998 - protein, 9 aa, Artificial Sequence
  Description of Artificial Sequence: Synthetic peptide
QLTEVVQKI

SEQ ID NO: 12999 - protein, 9 aa, Artificial Sequence
  Description of Artificial Sequence: Synthetic peptide
VVIQDNNEI

SEQ ID NO: 13000 - protein, 9 aa, Artificial Sequence
  Description of Artificial Sequence: Synthetic peptide
RVIEILQRA

SEQ ID NO: 13001 - protein, 9 aa, Artificial Sequence
  Description of Artificial Sequence: Synthetic peptide
AAVDLSHFL

SEQ ID NO: 13002 - protein, 9 aa, Artificial Sequence
  Description of Artificial Sequence: Synthetic peptide
ILAEAMSKA

SEQ ID NO: 13003 - protein, 9 aa, Artificial Sequence
  Description of Artificial Sequence: Synthetic peptide
VVAEGTDRV

SEQ ID NO: 13004 - protein, 9 aa, Artificial Sequence
  Description of Artificial Sequence: Synthetic peptide
ILAEAMSQV

SEQ ID NO: 13005 - protein, 9 aa, Artificial Sequence
  Description of Artificial Sequence: Synthetic peptide
AVLSVVNRV

SEQ ID NO: 13006 - protein, 9 aa, Artificial Sequence
  Description of Artificial Sequence: Synthetic peptide
TVLSIINRV

SEQ ID NO: 13007 - protein, 9 aa, Artificial Sequence
  Description of Artificial Sequence: Synthetic peptide
AVAEGTDRI

SEQ ID NO: 13008 - protein, 9 aa, Artificial Sequence
  Description of Artificial Sequence: Synthetic peptide
AAITLTAQA

SEQ ID NO: 13009 - protein, 9 aa, Artificial Sequence
  Description of Artificial Sequence: Synthetic peptide
KAIEAQQHL

SEQ ID NO: 13010 - protein, 9 aa, Artificial Sequence
  Description of Artificial Sequence: Synthetic peptide
VVAEGTDRI

SEQ ID NO: 13011 - protein, 9 aa, Artificial Sequence
  Description of Artificial Sequence: Synthetic peptide
GAVDLSHFL

SEQ ID NO: 13012 - protein, 9 aa, Artificial Sequence
  Description of Artificial Sequence: Synthetic peptide
IVNQIIEQL

SEQ ID NO: 13013 - protein, 9 aa, Artificial Sequence
  Description of Artificial Sequence: Synthetic peptide
AVLAVINRV

SEQ ID NO: 13014 - protein, 9 aa, Artificial Sequence
  Description of Artificial Sequence: Synthetic peptide
AVLSIINRV

SEQ ID NO: 13015 - protein, 9 aa, Artificial Sequence
  Description of Artificial Sequence: Synthetic peptide
LIPGDINNL

SEQ ID NO: 13016 - protein, 9 aa, Artificial Sequence
  Description of Artificial Sequence: Synthetic peptide
VQFNESVKI

SEQ ID NO: 13017 - protein, 11 aa, Artificial Sequence
  Description of Artificial Sequence: Synthetic peptide
TQVDPDLADQL

SEQ ID NO: 13018 - protein, 11 aa, Artificial Sequence
  Description of Artificial Sequence: Synthetic peptide
TQVDPGLADQL

SEQ ID NO: 13019 - protein, 9 aa, Artificial Sequence
  Description of Artificial Sequence: Synthetic peptide
AEAMSQVTA

SEQ ID NO: 13020 - protein, 9 aa, Artificial Sequence
  Description of Artificial Sequence: Synthetic peptide
EQAPPLVSL

SEQ ID NO: 13021 - protein, 9 aa, Artificial Sequence
  Description of Artificial Sequence: Synthetic peptide
SAISLFDTI

SEQ ID NO: 13022 - protein, 9 aa, Artificial Sequence
  Description of Artificial Sequence: Synthetic peptide
WTVNDIQKL

SEQ ID NO: 13023 - protein, 9 aa, Artificial Sequence
  Description of Artificial Sequence: Synthetic peptide
ATLEEMMTA

SEQ ID NO: 13024 - protein, 9 aa, Artificial Sequence
  Description of Artificial Sequence: Synthetic peptide
GAASITLTV

SEQ ID NO: 13025 - protein, 9 aa, Artificial Sequence
  Description of Artificial Sequence: Synthetic peptide
IVTDSQYAL

SEQ ID NO: 13026 - protein, 10 aa, Artificial Sequence
  Description of Artificial Sequence: Synthetic peptide
KAYDPEVHNV

SEQ ID NO: 13027 - protein, 9 aa, Artificial Sequence
  Description of Artificial Sequence: Synthetic peptide
SEIHQNPVP

SEQ ID NO: 13028 - protein, 9 aa, Artificial Sequence
  Description of Artificial Sequence: Synthetic peptide
IIKEPVHGV

SEQ ID NO: 13029 - protein, 9 aa, Artificial Sequence
  Description of Artificial Sequence: Synthetic peptide
EQVPPLISL

SEQ ID NO: 13030 - protein, 9 aa, Artificial Sequence
  Description of Artificial Sequence: Synthetic peptide
SQVTATSVL

SEQ ID NO: 13031 - protein, 9 aa, Artificial Sequence
  Description of Artificial Sequence: Synthetic peptide
AIVAYIVAI

SEQ ID NO: 13032 - protein, 9 aa, Artificial Sequence
  Description of Artificial Sequence: Synthetic peptide
LVNQIIEQL

SEQ ID NO: 13033 - protein, 9 aa, Artificial Sequence
  Description of Artificial Sequence: Synthetic peptide
FTSAVVKAA

SEQ ID NO: 13034 - protein, 9 aa, Artificial Sequence
  Description of Artificial Sequence: Synthetic peptide
ASITLTVQA

SEQ ID NO: 13035 - protein, 10 aa, Artificial Sequence
  Description of Artificial Sequence: Synthetic peptide
SQYALGIIQA

SEQ ID NO: 13036 - protein, 9 aa, Artificial Sequence
  Description of Artificial Sequence: Synthetic peptide
RIIEVLQRA

SEQ ID NO: 13037 - protein, 9 aa, Artificial Sequence
  Description of Artificial Sequence: Synthetic peptide
SQVTSTSIL

SEQ ID NO: 13038 - protein, 9 aa, Artificial Sequence
  Description of Artificial Sequence: Synthetic peptide
TTALFNTTL

SEQ ID NO: 13039 - protein, 9 aa, Artificial Sequence
  Description of Artificial Sequence: Synthetic peptide
TIYRLIEEA

SEQ ID NO: 13040 - protein, 9 aa, Artificial Sequence
  Description of Artificial Sequence: Synthetic peptide
RIIEILQRA

SEQ ID NO: 13041 - protein, 9 aa, Artificial Sequence
  Description of Artificial Sequence: Synthetic peptide
YAAPIAGQI

SEQ ID NO: 13042 - protein, 9 aa, Artificial Sequence
  Description of Artificial Sequence: Synthetic peptide
MVVGGLIGL

SEQ ID NO: 13043 - protein, 11 aa, Artificial Sequence
  Description of Artificial Sequence: Synthetic peptide
VVIQDNNEIKV

SEQ ID NO: 13044 - protein, 9 aa, Artificial Sequence
  Description of Artificial Sequence: Synthetic peptide
RVAAEVKNL

SEQ ID NO: 13045 - protein, 9 aa, Artificial Sequence
  Description of Artificial Sequence: Synthetic peptide
YQSNPYPKL

SEQ ID NO: 13046 - protein, 10 aa, Artificial Sequence
  Description of Artificial Sequence: Synthetic peptide
GEIIGDIRKA

SEQ ID NO: 13047 - protein, 9 aa, Artificial Sequence
  Description of Artificial Sequence: Synthetic peptide
TTSNLQEQI

SEQ ID NO: 13048 - protein, 9 aa, Artificial Sequence
  Description of Artificial Sequence: Synthetic peptide
FTSTVVKAA

SEQ ID NO: 13049 - protein, 9 aa, Artificial Sequence
  Description of Artificial Sequence: Synthetic peptide
TETLLVQNA

SEQ ID NO: 13050 - protein, 9 aa, Artificial Sequence
  Description of Artificial Sequence: Synthetic peptide
MIIGSLIGL

SEQ ID NO: 13051 - protein, 10 aa, Artificial Sequence
  Description of Artificial Sequence: Synthetic peptide
GVAKEVQSHL

SEQ ID NO: 13052 - protein, 9 aa, Artificial Sequence
  Description of Artificial Sequence: Synthetic peptide
TIYRLIESA

SEQ ID NO: 13053 - protein, 9 aa, Artificial Sequence
  Description of Artificial Sequence: Synthetic peptide
KVKPPLPSV

SEQ ID NO: 13054 - protein, 9 aa, Artificial Sequence
  Description of Artificial Sequence: Synthetic peptide
ILKEPVHGV

SEQ ID NO: 13055 - protein, 11 aa, Artificial Sequence
  Description of Artificial Sequence: Synthetic peptide
EVIPAETGQEA

SEQ ID NO: 13056 - protein, 9 aa, Artificial Sequence
  Description of Artificial Sequence: Synthetic peptide
TVLGDIRKA

SEQ ID NO: 13057 - protein, 9 aa, Artificial Sequence
  Description of Artificial Sequence: Synthetic peptide
QLTEVVQKV

SEQ ID NO: 13058 - protein, 9 aa, Artificial Sequence
  Description of Artificial Sequence: Synthetic peptide
AVLAVINRV

SEQ ID NO: 13059 - protein, 9 aa, Artificial Sequence
  Description of Artificial Sequence: Synthetic peptide
AVLSVVNRV

SEQ ID NO: 13060 - protein, 9 aa, Artificial Sequence
  Description of Artificial Sequence: Synthetic peptide
QLTEVVQKI

SEQ ID NO: 13061 - protein, 9 aa, Artificial Sequence
  Description of Artificial Sequence: Synthetic peptide
IQDNNEIKV

SEQ ID NO: 13062 - protein, 9 aa, Artificial Sequence
  Description of Artificial Sequence: Synthetic peptide
IVTDSQYAL

SEQ ID NO: 13063 - protein, 9 aa, Artificial Sequence
  Description of Artificial Sequence: Synthetic peptide
AVLSIINRV

SEQ ID NO: 13064 - protein, 9 aa, Artificial Sequence
  Description of Artificial Sequence: Synthetic peptide
FIPGNINNL

SEQ ID NO: 13065 - protein, 9 aa, Artificial Sequence
  Description of Artificial Sequence: Synthetic peptide
VVIQDNNEI

SEQ ID NO: 13066 - protein, 9 aa, Artificial Sequence
  Description of Artificial Sequence: Synthetic peptide
SAISLFDTI

SEQ ID NO: 13067 - protein, 9 aa, Artificial Sequence
  Description of Artificial Sequence: Synthetic peptide
AAVDLSHFL

SEQ ID NO: 13068 - protein, 9 aa, Artificial Sequence
  Description of Artificial Sequence: Synthetic peptide
MVVGGLIGL

SEQ ID NO: 13069 - protein, 9 aa, Artificial Sequence
  Description of Artificial Sequence: Synthetic peptide
RVIEILQRA

SEQ ID NO: 13070 - protein, 9 aa, Artificial Sequence
  Description of Artificial Sequence: Synthetic peptide
AIVAYIVAI

SEQ ID NO: 13071 - protein, 9 aa, Artificial Sequence
  Description of Artificial Sequence: Synthetic peptide
TVTQACPKV

SEQ ID NO: 13072 - protein, 9 aa, Artificial Sequence
  Description of Artificial Sequence: Synthetic peptide
ILAEAMSQV

SEQ ID NO: 13073 - protein, 11 aa, Artificial Sequence
  Description of Artificial Sequence: Synthetic peptide
VVIQDNNEIKV

SEQ ID NO: 13074 - protein, 11 aa, Artificial Sequence
  Description of Artificial Sequence: Synthetic peptide
TQVDPGLADQL

SEQ ID NO: 13075 - protein, 9 aa, Artificial Sequence
  Description of Artificial Sequence: Synthetic peptide
GGIGGFIKV

SEQ ID NO: 13076 - protein, 9 aa, Artificial Sequence
  Description of Artificial Sequence: Synthetic peptide
YQLETEPIL

SEQ ID NO: 13077 - protein, 9 aa, Artificial Sequence
  Description of Artificial Sequence: Synthetic peptide
TVLSIINRV

SEQ ID NO: 13078 - protein, 9 aa, Artificial Sequence
  Description of Artificial Sequence: Synthetic peptide
FIPGDINNL

SEQ ID NO: 13079 - protein, 9 aa, Artificial Sequence
  Description of Artificial Sequence: Synthetic peptide
KAIEAQQHL

SEQ ID NO: 13080 - protein, 10 aa, Artificial Sequence
  Description of Artificial Sequence: Synthetic peptide
TVLDVGDAYF

SEQ ID NO: 13081 - protein, 9 aa, Artificial Sequence
  Description of Artificial Sequence: Synthetic peptide
GAVDLSHFL

SEQ ID NO: 13082 - protein, 9 aa, Artificial Sequence
  Description of Artificial Sequence: Synthetic peptide
VVAEGTDRV

SEQ ID NO: 13083 - protein, 11 aa, Artificial Sequence
  Description of Artificial Sequence: Synthetic peptide
TQVDPDLADQL

SEQ ID NO: 13084 - protein, 9 aa, Artificial Sequence
  Description of Artificial Sequence: Synthetic peptide
MIIGSLIGL

SEQ ID NO: 13085 - protein, 9 aa, Artificial Sequence
  Description of Artificial Sequence: Synthetic peptide
EQVPPLISL

SEQ ID NO: 13086 - protein, 10 aa, Artificial Sequence
  Description of Artificial Sequence: Synthetic peptide
KVVKIEPLGV

SEQ ID NO: 13087 - protein, 9 aa, Artificial Sequence
  Description of Artificial Sequence: Synthetic peptide
VQFNESVKI

SEQ ID NO: 13088 - protein, 9 aa, Artificial Sequence
  Description of Artificial Sequence: Synthetic peptide
GAASITLTV

SEQ ID NO: 13089 - protein, 9 aa, Artificial Sequence
  Description of Artificial Sequence: Synthetic peptide
EQAPPLVSL

SEQ ID NO: 13090 - protein, 9 aa, Artificial Sequence
  Description of Artificial Sequence: Synthetic peptide
KVKPPLPSV

SEQ ID NO: 13091 - protein, 9 aa, Artificial Sequence
  Description of Artificial Sequence: Synthetic peptide
SQIYPGIRV

SEQ ID NO: 13092 - protein, 9 aa, Artificial Sequence
  Description of Artificial Sequence: Synthetic peptide
IVNQIIEQL

SEQ ID NO: 13093 - protein, 9 aa, Artificial Sequence
  Description of Artificial Sequence: Synthetic peptide
AAAPGVGAV

SEQ ID NO: 13094 - protein, 9 aa, Artificial Sequence
  Description of Artificial Sequence: Synthetic peptide
YQSNPYPKL

SEQ ID NO: 13095 - protein, 9 aa, Artificial Sequence
  Description of Artificial Sequence: Synthetic peptide
AVAEGTDRI

SEQ ID NO: 13096 - protein, 9 aa, Artificial Sequence
  Description of Artificial Sequence: Synthetic peptide
DQVPIEICG

SEQ ID NO: 13097 - protein, 9 aa, Artificial Sequence
  Description of Artificial Sequence: Synthetic peptide
GLYPPLTSL

SEQ ID NO: 13098 - protein, 9 aa, Artificial Sequence
  Description of Artificial Sequence: Synthetic peptide
AALDLSHFL

SEQ ID NO: 13099 - protein, 9 aa, Artificial Sequence
  Description of Artificial Sequence: Synthetic peptide
FLDNVTENF

SEQ ID NO: 13100 - protein, 9 aa, Artificial Sequence
  Description of Artificial Sequence: Synthetic peptide
FIPGNINNL

SEQ ID NO: 13101 - protein, 9 aa, Artificial Sequence
  Description of Artificial Sequence: Synthetic peptide
YVDRFFKTL

SEQ ID NO: 13102 - protein, 9 aa, Artificial Sequence
  Description of Artificial Sequence: Synthetic peptide
QLTEVVQKV

SEQ ID NO: 13103 - protein, 10 aa, Artificial Sequence
  Description of Artificial Sequence: Synthetic peptide
KLDDLEKIRL

SEQ ID NO: 13104 - protein, 9 aa, Artificial Sequence
  Description of Artificial Sequence: Synthetic peptide
FIPGDINNL

SEQ ID NO: 13105 - protein, 9 aa, Artificial Sequence
  Description of Artificial Sequence: Synthetic peptide
AVLSVVNRV

SEQ ID NO: 13106 - protein, 9 aa, Artificial Sequence
  Description of Artificial Sequence: Synthetic peptide
AVLAVINRV

SEQ ID NO: 13107 - protein, 9 aa, Artificial Sequence
  Description of Artificial Sequence: Synthetic peptide
ATDDLWVTV

SEQ ID NO: 13108 - protein, 9 aa, Artificial Sequence
  Description of Artificial Sequence: Synthetic peptide
GTDRIIEVL

SEQ ID NO: 13109 - protein, 9 aa, Artificial Sequence
  Description of Artificial Sequence: Synthetic peptide
LLDRTAIAV

SEQ ID NO: 13110 - protein, 9 aa, Artificial Sequence
  Description of Artificial Sequence: Synthetic peptide
AVLSIINRV

SEQ ID NO: 13111 - protein, 9 aa, Artificial Sequence
  Description of Artificial Sequence: Synthetic peptide
QLTEVVQKI

SEQ ID NO: 13112 - protein, 9 aa, Artificial Sequence
  Description of Artificial Sequence: Synthetic peptide
AYDPEVHNV

SEQ ID NO: 13113 - protein, 9 aa, Artificial Sequence
  Description of Artificial Sequence: Synthetic peptide
LIPGDINNL

SEQ ID NO: 13114 - protein, 9 aa, Artificial Sequence
  Description of Artificial Sequence: Synthetic peptide
AADKLWVTV

SEQ ID NO: 13115 - protein, 9 aa, Artificial Sequence
  Description of Artificial Sequence: Synthetic peptide
ILKEPVHGV

SEQ ID NO: 13116 - protein, 9 aa, Artificial Sequence
  Description of Artificial Sequence: Synthetic peptide
FLPLTWDDL

SEQ ID NO: 13117 - protein, 9 aa, Artificial Sequence
  Description of Artificial Sequence: Synthetic peptide
TVLSIINRV

SEQ ID NO: 13118 - protein, 9 aa, Artificial Sequence
  Description of Artificial Sequence: Synthetic peptide
ILAEAMSQV

SEQ ID NO: 13119 - protein, 9 aa, Artificial Sequence
  Description of Artificial Sequence: Synthetic peptide
FSPEVIPMF

SEQ ID NO: 13120 - protein, 9 aa, Artificial Sequence
  Description of Artificial Sequence: Synthetic peptide
GTDRVIEIL

SEQ ID NO: 13121 - protein, 9 aa, Artificial Sequence
  Description of Artificial Sequence: Synthetic peptide
SLDFPQITL

SEQ ID NO: 13122 - protein, 9 aa, Artificial Sequence
  Description of Artificial Sequence: Synthetic peptide
HLEGKIILV

SEQ ID NO: 13123 - protein, 9 aa, Artificial Sequence
  Description of Artificial Sequence: Synthetic peptide
YTDTIYRLI

SEQ ID NO: 13124 - protein, 9 aa, Artificial Sequence
  Description of Artificial Sequence: Synthetic peptide
IIKEPVHGV

SEQ ID NO: 13125 - protein, 9 aa, Artificial Sequence
  Description of Artificial Sequence: Synthetic peptide
AADNLWVTV

SEQ ID NO: 13126 - protein, 10 aa, Artificial Sequence
  Description of Artificial Sequence: Synthetic peptide
KVVRIEPVGV

SEQ ID NO: 13127 - protein, 9 aa, Artificial Sequence
  Description of Artificial Sequence: Synthetic peptide
FIPGNINNL

SEQ ID NO: 13128 - protein, 9 aa, Artificial Sequence
  Description of Artificial Sequence: Synthetic peptide
QLTEVVQKV

SEQ ID NO: 13129 - protein, 9 aa, Artificial Sequence
  Description of Artificial Sequence: Synthetic peptide
RVAAEVKNL

SEQ ID NO: 13130 - protein, 9 aa, Artificial Sequence
  Description of Artificial Sequence: Synthetic peptide
KVKPPLPSV

SEQ ID NO: 13131 - protein, 9 aa, Artificial Sequence
  Description of Artificial Sequence: Synthetic peptide
ILAEAMSKA

SEQ ID NO: 13132 - protein, 9 aa, Artificial Sequence
  Description of Artificial Sequence: Synthetic peptide
RVIEILQRA

SEQ ID NO: 13133 - protein, 10 aa, Artificial Sequence
  Description of Artificial Sequence: Synthetic peptide
KIIGQLQSSL

SEQ ID NO: 13134 - protein, 10 aa, Artificial Sequence
  Description of Artificial Sequence: Synthetic peptide
KVVKIEPLGV

SEQ ID NO: 13135 - protein, 9 aa, Artificial Sequence
  Description of Artificial Sequence: Synthetic peptide
AVLSIINRV

SEQ ID NO: 13136 - protein, 9 aa, Artificial Sequence
  Description of Artificial Sequence: Synthetic peptide
IIKEPVHGV

SEQ ID NO: 13137 - protein, 9 aa, Artificial Sequence
  Description of Artificial Sequence: Synthetic peptide
AVLSVVNRV

SEQ ID NO: 13138 - protein, 9 aa, Artificial Sequence
  Description of Artificial Sequence: Synthetic peptide
FIPGDINNL

SEQ ID NO: 13139 - protein, 9 aa, Artificial Sequence
  Description of Artificial Sequence: Synthetic peptide
IVNQIIEQL

SEQ ID NO: 13140 - protein, 9 aa, Artificial Sequence
  Description of Artificial Sequence: Synthetic peptide
AIIRTLQQL

SEQ ID NO: 13141 - protein, 9 aa, Artificial Sequence
  Description of Artificial Sequence: Synthetic peptide
VVIQDNNEI

SEQ ID NO: 13142 - protein, 9 aa, Artificial Sequence
  Description of Artificial Sequence: Synthetic peptide
KAIEAQQHL

SEQ ID NO: 13143 - protein, 9 aa, Artificial Sequence
  Description of Artificial Sequence: Synthetic peptide
KVVSLTETT

SEQ ID NO: 13144 - protein, 9 aa, Artificial Sequence
  Description of Artificial Sequence: Synthetic peptide
TIYRLIEEA

SEQ ID NO: 13145 - protein, 9 aa, Artificial Sequence
  Description of Artificial Sequence: Synthetic peptide
RIIEVLQRA

SEQ ID NO: 13146 - protein, 9 aa, Artificial Sequence
  Description of Artificial Sequence: Synthetic peptide
WTVNDIQKL

SEQ ID NO: 13147 - protein, 9 aa, Artificial Sequence
  Description of Artificial Sequence: Synthetic peptide
AEAMSQVTA

SEQ ID NO: 13148 - protein, 9 aa, Artificial Sequence
  Description of Artificial Sequence: Synthetic peptide
KVVPLTETT

SEQ ID NO: 13149 - protein, 9 aa, Artificial Sequence
  Description of Artificial Sequence: Synthetic peptide
ILAEAMSQV

SEQ ID NO: 13150 - protein, 9 aa, Artificial Sequence
  Description of Artificial Sequence: Synthetic peptide
QLTEVVQKI

SEQ ID NO: 13151 - protein, 10 aa, Artificial Sequence
  Description of Artificial Sequence: Synthetic peptide
GVAKEVQSHL

SEQ ID NO: 13152 - protein, 9 aa, Artificial Sequence
  Description of Artificial Sequence: Synthetic peptide
AIIRILQQL

SEQ ID NO: 13153 - protein, 9 aa, Artificial Sequence
  Description of Artificial Sequence: Synthetic peptide
TIYRLIESA

SEQ ID NO: 13154 - protein, 9 aa, Artificial Sequence
  Description of Artificial Sequence: Synthetic peptide
TVLSIINRV

SEQ ID NO: 13155 - protein, 9 aa, Artificial Sequence
  Description of Artificial Sequence: Synthetic peptide
AVLAVINRV

SEQ ID NO: 13156 - protein, 9 aa, Artificial Sequence
  Description of Artificial Sequence: Synthetic peptide
RIIEILQRA

SEQ ID NO: 13157 - protein, 10 aa, Artificial Sequence
  Description of Artificial Sequence: Synthetic peptide
KAYDPEVHNV

SEQ ID NO: 13158 - protein, 10 aa, Artificial Sequence
  Description of Artificial Sequence: Synthetic peptide
AVVIQDNNEI

SEQ ID NO: 13159 - protein, 10 aa, Artificial Sequence
  Description of Artificial Sequence: Synthetic peptide
KQLTEVVQKV

SEQ ID NO: 13160 - protein, 9 aa, Artificial Sequence
  Description of Artificial Sequence: Synthetic peptide
KIKPPLPSV

SEQ ID NO: 13161 - protein, 9 aa, Artificial Sequence
  Description of Artificial Sequence: Synthetic peptide
LIPGDINNL

SEQ ID NO: 13162 - protein, 9 aa, Artificial Sequence
  Description of Artificial Sequence: Synthetic peptide
MVVGGLIGL

SEQ ID NO: 13163 - protein, 10 aa, Artificial Sequence
  Description of Artificial Sequence: Synthetic peptide
KIIGQIRDQA

SEQ ID NO: 13164 - protein, 9 aa, Artificial Sequence
  Description of Artificial Sequence: Synthetic peptide
IVQQQNNLL

SEQ ID NO: 13165 - protein, 11 aa, Artificial Sequence
  Description of Artificial Sequence: Synthetic peptide
ALFNATNMTNA

SEQ ID NO: 13166 - protein, 9 aa, Artificial Sequence
  Description of Artificial Sequence: Synthetic peptide
TIYKLIENA

SEQ ID NO: 13167 - protein, 10 aa, Artificial Sequence
  Description of Artificial Sequence: Synthetic peptide
KIIGQLQPSL

SEQ ID NO: 13168 - protein, 9 aa, Artificial Sequence
  Description of Artificial Sequence: Synthetic peptide
ILKEPVHGV

SEQ ID NO: 13169 - protein, 10 aa, Artificial Sequence
  Description of Artificial Sequence: Synthetic peptide
GTVLGDIRKA

SEQ ID NO: 13170 - protein, 10 aa, Artificial Sequence
  Description of Artificial Sequence: Synthetic peptide
KAIEAQQHLL

SEQ ID NO: 13171 - protein, 9 aa, Artificial Sequence
  Description of Artificial Sequence: Synthetic peptide
FTSAVVKAA

SEQ ID NO: 13172 - protein, 9 aa, Artificial Sequence
  Description of Artificial Sequence: Synthetic peptide
EIIGDIRKA

SEQ ID NO: 13173 - protein, 9 aa, Artificial Sequence
  Description of Artificial Sequence: Synthetic peptide
FTSTVVKAA

SEQ ID NO: 13174 - protein, 9 aa, Artificial Sequence
  Description of Artificial Sequence: Synthetic peptide
AIVAYIVAI

SEQ ID NO: 13175 - protein, 9 aa, Artificial Sequence
  Description of Artificial Sequence: Synthetic peptide
GTDRIIEVL

SEQ ID NO: 13176 - protein, 9 aa, Artificial Sequence
  Description of Artificial Sequence: Synthetic peptide
MIIGSLIGL

SEQ ID NO: 13177 - protein, 9 aa, Artificial Sequence
  Description of Artificial Sequence: Synthetic peptide
VVKIEPLGV

SEQ ID NO: 13178 - protein, 9 aa, Artificial Sequence
  Description of Artificial Sequence: Synthetic peptide
TMIRILQQL

SEQ ID NO: 13179 - protein, 11 aa, Artificial Sequence
  Description of Artificial Sequence: Synthetic peptide
ATADKGVSKGV

SEQ ID NO: 13180 - protein, 10 aa, Artificial Sequence
  Description of Artificial Sequence: Synthetic peptide
ATSTAIMMQK

SEQ ID NO: 13181 - protein, 9 aa, Artificial Sequence
  Description of Artificial Sequence: Synthetic peptide
QIYPGIRVK

SEQ ID NO: 13182 - protein, 10 aa, Artificial Sequence
  Description of Artificial Sequence: Synthetic peptide
ATGAAIMMQK

SEQ ID NO: 13183 - protein, 9 aa, Artificial Sequence
  Description of Artificial Sequence: Synthetic peptide
QIYPGIRIK

SEQ ID NO: 13184 - protein, 10 aa, Artificial Sequence
  Description of Artificial Sequence: Synthetic peptide
VTSTSILMQK

SEQ ID NO: 13185 - protein, 10 aa, Artificial Sequence
  Description of Artificial Sequence: Synthetic peptide
VTATSVLMQK

SEQ ID NO: 13186 - protein, 10 aa, Artificial Sequence
  Description of Artificial Sequence: Synthetic peptide
AMYAPPIAGK

SEQ ID NO: 13187 - protein, 11 aa, Artificial Sequence
  Description of Artificial Sequence: Synthetic peptide
QVTSTSILMQK

SEQ ID NO: 13188 - protein, 10 aa, Artificial Sequence
  Description of Artificial Sequence: Synthetic peptide
IVQQQSNLLK

SEQ ID NO: 13189 - protein, 11 aa, Artificial Sequence
  Description of Artificial Sequence: Synthetic peptide
QVTATSVLMQK

SEQ ID NO: 13190 - protein, 10 aa, Artificial Sequence
  Description of Artificial Sequence: Synthetic peptide
GLYPPLTSLK

SEQ ID NO: 13191 - protein, 9 aa, Artificial Sequence
  Description of Artificial Sequence: Synthetic peptide
ALTALVTPK

SEQ ID NO: 13192 - protein, 9 aa, Artificial Sequence
  Description of Artificial Sequence: Synthetic peptide
RLYERIIER

SEQ ID NO: 13193 - protein, 9 aa, Artificial Sequence
  Description of Artificial Sequence: Synthetic peptide
AIFQSSMTK

SEQ ID NO: 13194 - protein, 9 aa, Artificial Sequence
  Description of Artificial Sequence: Synthetic peptide
ALTALITPK

SEQ ID NO: 13195 - protein, 9 aa, Artificial Sequence
  Description of Artificial Sequence: Synthetic peptide
TSTSILMQK

SEQ ID NO: 13196 - protein, 9 aa, Artificial Sequence
  Description of Artificial Sequence: Synthetic peptide
SNYTGTIYK

SEQ ID NO: 13197 - protein, 10 aa, Artificial Sequence
  Description of Artificial Sequence: Synthetic peptide
IVQQQNNLLK

SEQ ID NO: 13198 - protein, 9 aa, Artificial Sequence
  Description of Artificial Sequence: Synthetic peptide
TATSVLMQK

SEQ ID NO: 13199 - protein, 10 aa, Artificial Sequence
  Description of Artificial Sequence: Synthetic peptide
SVLMQKSNFK

SEQ ID NO: 13200 - protein, 8 aa, Artificial Sequence
  Description of Artificial Sequence: Synthetic peptide
STAIMMQK

SEQ ID NO: 13201 - protein, 9 aa, Artificial Sequence
  Description of Artificial Sequence: Synthetic peptide
GLADQLIHK

SEQ ID NO: 13202 - protein, 11 aa, Artificial Sequence
  Description of Artificial Sequence: Synthetic peptide
KVKPPLPSVKK

SEQ ID NO: 13203 - protein, 9 aa, Artificial Sequence
  Description of Artificial Sequence: Synthetic peptide
TSTAIMMQK

SEQ ID NO: 13204 - protein, 8 aa, Artificial Sequence
  Description of Artificial Sequence: Synthetic peptide
ATSVLMQK

SEQ ID NO: 13205 - protein, 9 aa, Artificial Sequence
  Description of Artificial Sequence: Synthetic peptide
AIRNAILGH

SEQ ID NO: 13206 - protein, 9 aa, Artificial Sequence
  Description of Artificial Sequence: Synthetic peptide
KLVSTGIRK

SEQ ID NO: 13207 - protein, 10 aa, Artificial Sequence
  Description of Artificial Sequence: Synthetic peptide
KVKPPLPSVK

SEQ ID NO: 13208 - protein, 9 aa, Artificial Sequence
  Description of Artificial Sequence: Synthetic peptide
LLNGSLAEK

SEQ ID NO: 13209 - protein, 10 aa, Artificial Sequence
  Description of Artificial Sequence: Synthetic peptide
KTFNGTGLCR

SEQ ID NO: 13210 - protein, 9 aa, Artificial Sequence
  Description of Artificial Sequence: Synthetic peptide
ATADKGVSK

SEQ ID NO: 13211 - protein, 9 aa, Artificial Sequence
  Description of Artificial Sequence: Synthetic peptide
KILEPFRAK

SEQ ID NO: 13212 - protein, 9 aa, Artificial Sequence
  Description of Artificial Sequence: Synthetic peptide
QIIEQLIQK

SEQ ID NO: 13213 - protein, 10 aa, Artificial Sequence
  Description of Artificial Sequence: Synthetic peptide
ALNPGLLETK

SEQ ID NO: 13214 - protein, 10 aa, Artificial Sequence
  Description of Artificial Sequence: Synthetic peptide
TVYYGVPVWK

SEQ ID NO: 13215 - protein, 9 aa, Artificial Sequence
  Description of Artificial Sequence: Synthetic peptide
RLYERIRER

SEQ ID NO: 13216 - protein, 11 aa, Artificial Sequence
  Description of Artificial Sequence: Synthetic peptide
TVNDIQKLVGK

SEQ ID NO: 13217 - protein, 9 aa, Artificial Sequence
  Description of Artificial Sequence: Synthetic peptide
KILEPFRVK

SEQ ID NO: 13218 - protein, 9 aa, Artificial Sequence
  Description of Artificial Sequence: Synthetic peptide
RILAEAMSK

SEQ ID NO: 13219 - protein, 8 aa, Artificial Sequence
  Description of Artificial Sequence: Synthetic peptide
ILAEAMSK

SEQ ID NO: 13220 - protein, 9 aa, Artificial Sequence
  Description of Artificial Sequence: Synthetic peptide
TGAAIMMQK

SEQ ID NO: 13221 - protein, 9 aa, Artificial Sequence
  Description of Artificial Sequence: Synthetic peptide
TINGTLWNK

SEQ ID NO: 13222 - protein, 9 aa, Artificial Sequence
  Description of Artificial Sequence: Synthetic peptide
KIHQDPVPK

SEQ ID NO: 13223 - protein, 9 aa, Artificial Sequence
  Description of Artificial Sequence: Synthetic peptide
SITGLILTR

SEQ ID NO: 13224 - protein, 9 aa, Artificial Sequence
  Description of Artificial Sequence: Synthetic peptide
AVLYYVHQK

SEQ ID NO: 13225 - protein, 10 aa, Artificial Sequence
  Description of Artificial Sequence: Synthetic peptide
ATSTAIMMQK

SEQ ID NO: 13226 - protein, 10 aa, Artificial Sequence
  Description of Artificial Sequence: Synthetic peptide
ATGAAIMMQK

SEQ ID NO: 13227 - protein, 11 aa, Artificial Sequence
  Description of Artificial Sequence: Synthetic peptide
QVTSTSILMQK

SEQ ID NO: 13228 - protein, 10 aa, Artificial Sequence
  Description of Artificial Sequence: Synthetic peptide
IVQQQSNLLK

SEQ ID NO: 13229 - protein, 11 aa, Artificial Sequence
  Description of Artificial Sequence: Synthetic peptide
TVNDIQKLVGK

SEQ ID NO: 13230 - protein, 10 aa, Artificial Sequence
  Description of Artificial Sequence: Synthetic peptide
IVQQQNNLLK

SEQ ID NO: 13231 - protein, 10 aa, Artificial Sequence
  Description of Artificial Sequence: Synthetic peptide
TVQAIQLPNK

SEQ ID NO: 13232 - protein, 11 aa, Artificial Sequence
  Description of Artificial Sequence: Synthetic peptide
QVTATSVLMQK

SEQ ID NO: 13233 - protein, 10 aa, Artificial Sequence
  Description of Artificial Sequence: Synthetic peptide
VTSTSILMQK

SEQ ID NO: 13234 - protein, 11 aa, Artificial Sequence
  Description of Artificial Sequence: Synthetic peptide
RIEPVGVAPTK

SEQ ID NO: 13235 - protein, 9 aa, Artificial Sequence
  Description of Artificial Sequence: Synthetic peptide
TINGTLWNK

SEQ ID NO: 13236 - protein, 10 aa, Artificial Sequence
  Description of Artificial Sequence: Synthetic peptide
VTATSVLMQK

SEQ ID NO: 13237 - protein, 9 aa, Artificial Sequence
  Description of Artificial Sequence: Synthetic peptide
QIYPGIRVK

SEQ ID NO: 13238 - protein, 10 aa, Artificial Sequence
  Description of Artificial Sequence: Synthetic peptide
TVQPIQLPEK

SEQ ID NO: 13239 - protein, 10 aa, Artificial Sequence
  Description of Artificial Sequence: Synthetic peptide
ALNPGLLETK

SEQ ID NO: 13240 - protein, 9 aa, Artificial Sequence
  Description of Artificial Sequence: Synthetic peptide
ALTALVTPK

SEQ ID NO: 13241 - protein, 9 aa, Artificial Sequence
  Description of Artificial Sequence: Synthetic peptide
TATSVLMQK

SEQ ID NO: 13242 - protein, 9 aa, Artificial Sequence
  Description of Artificial Sequence: Synthetic peptide
ALTALITPK

SEQ ID NO: 13243 - protein, 9 aa, Artificial Sequence
  Description of Artificial Sequence: Synthetic peptide
TSTSILMQK

SEQ ID NO: 13244 - protein, 10 aa, Artificial Sequence
  Description of Artificial Sequence: Synthetic peptide
GSNFTSAVVK

SEQ ID NO: 13245 - protein, 10 aa, Artificial Sequence
  Description of Artificial Sequence: Synthetic peptide
TVQAIQLPDK

SEQ ID NO: 13246 - protein, 9 aa, Artificial Sequence
  Description of Artificial Sequence: Synthetic peptide
LLNGSLAEK

SEQ ID NO: 13247 - protein, 10 aa, Artificial Sequence
  Description of Artificial Sequence: Synthetic peptide
AMYAPPIAGK

SEQ ID NO: 13248 - protein, 9 aa, Artificial Sequence
  Description of Artificial Sequence: Synthetic peptide
AIFQSSMTK

SEQ ID NO: 13249 - protein, 11 aa, Artificial Sequence
  Description of Artificial Sequence: Synthetic peptide
KIEPLGVAPTK

SEQ ID NO: 13250 - protein, 11 aa, Artificial Sequence
  Description of Artificial Sequence: Synthetic peptide
VVSLTETTNQK

SEQ ID NO: 13251 - protein, 9 aa, Artificial Sequence
  Description of Artificial Sequence: Synthetic peptide
AVDLSHFLK

SEQ ID NO: 13252 - protein, 9 aa, Artificial Sequence
  Description of Artificial Sequence: Synthetic peptide
QIIEQLIQK

SEQ ID NO: 13253 - protein, 9 aa, Artificial Sequence
  Description of Artificial Sequence: Synthetic peptide
ATADKGVSK

SEQ ID NO: 13254 - protein, 9 aa, Artificial Sequence
  Description of Artificial Sequence: Synthetic peptide
KIHQDPVPK

SEQ ID NO: 13255 - protein, 8 aa, Artificial Sequence
  Description of Artificial Sequence: Synthetic peptide
ILAEAMSK

SEQ ID NO: 13256 - protein, 11 aa, Artificial Sequence
  Description of Artificial Sequence: Synthetic peptide
ATGEIIGDIRK

SEQ ID NO: 13257 - protein, 11 aa, Artificial Sequence
  Description of Artificial Sequence: Synthetic peptide
ATGTVLGDIRK

SEQ ID NO: 13258 - protein, 9 aa, Artificial Sequence
  Description of Artificial Sequence: Synthetic peptide
AVLYYVHQK

SEQ ID NO: 13259 - protein, 11 aa, Artificial Sequence
  Description of Artificial Sequence: Synthetic peptide
ATGEIIGDTRK

SEQ ID NO: 13260 - protein, 10 aa, Artificial Sequence
  Description of Artificial Sequence: Synthetic peptide
SLQTGSEELK

SEQ ID NO: 13261 - protein, 9 aa, Artificial Sequence
  Description of Artificial Sequence: Synthetic peptide
APAGFAILK

SEQ ID NO: 13262 - protein, 9 aa, Artificial Sequence
  Description of Artificial Sequence: Synthetic peptide
QIYPGIRIK

SEQ ID NO: 13263 - protein, 11 aa, Artificial Sequence
  Description of Artificial Sequence: Synthetic peptide
TMSDINGTSLK

SEQ ID NO: 13264 - protein, 10 aa, Artificial Sequence
  Description of Artificial Sequence: Synthetic peptide
GSNFTSTVVK

SEQ ID NO: 13265 - protein, 9 aa, Artificial Sequence
  Description of Artificial Sequence: Synthetic peptide
KQLTEVVQK

SEQ ID NO: 13266 - protein, 11 aa, Artificial Sequence
  Description of Artificial Sequence: Synthetic peptide
QSQGVVESMNK

SEQ ID NO: 13267 - protein, 9 aa, Artificial Sequence
  Description of Artificial Sequence: Synthetic peptide
SNFTSAVVK

SEQ ID NO: 13268 - protein, 10 aa, Artificial Sequence
  Description of Artificial Sequence: Synthetic peptide
GLYPPLTSLK

SEQ ID NO: 13269 - protein, 9 aa, Artificial Sequence
  Description of Artificial Sequence: Synthetic peptide
RILAEAMSK

SEQ ID NO: 13270 - protein, 9 aa, Artificial Sequence
  Description of Artificial Sequence: Synthetic peptide
MYAPPIAGK

SEQ ID NO: 13271 - protein, 8 aa, Artificial Sequence
  Description of Artificial Sequence: Synthetic peptide
ATSVLMQK

SEQ ID NO: 13272 - protein, 9 aa, Artificial Sequence
  Description of Artificial Sequence: Synthetic peptide
ASDAKAYEK

SEQ ID NO: 13273 - protein, 10 aa, Artificial Sequence
  Description of Artificial Sequence: Synthetic peptide
SIETVPVKLK

SEQ ID NO: 13274 - protein, 10 aa, Artificial Sequence
  Description of Artificial Sequence: Synthetic peptide
AQEDIIIRSK

SEQ ID NO: 13275 - protein, 9 aa, Artificial Sequence
  Description of Artificial Sequence: Synthetic peptide
SNYTGTIYK

SEQ ID NO: 13276 - protein, 8 aa, Artificial Sequence
  Description of Artificial Sequence: Synthetic peptide
STAIMMQK

SEQ ID NO: 13277 - protein, 9 aa, Artificial Sequence
  Description of Artificial Sequence: Synthetic peptide
IIATDIQTK

SEQ ID NO: 13278 - protein, 10 aa, Artificial Sequence
  Description of Artificial Sequence: Synthetic peptide
ATNMTNAMNR

SEQ ID NO: 13279 - protein, 9 aa, Artificial Sequence
  Description of Artificial Sequence: Synthetic peptide
TSTAIMMQK

SEQ ID NO: 13280 - protein, 9 aa, Artificial Sequence
  Description of Artificial Sequence: Synthetic peptide
VQQQNNLLK

SEQ ID NO: 13281 - protein, 10 aa, Artificial Sequence
  Description of Artificial Sequence: Synthetic peptide
ATESIVIWGK

SEQ ID NO: 13282 - protein, 10 aa, Artificial Sequence
  Description of Artificial Sequence: Synthetic peptide
TLNRVAAEVK

SEQ ID NO: 13283 - protein, 9 aa, Artificial Sequence
  Description of Artificial Sequence: Synthetic peptide
GLADQLIHK

SEQ ID NO: 13284 - protein, 11 aa, Artificial Sequence
  Description of Artificial Sequence: Synthetic peptide
ATDIQTKELQK

SEQ ID NO: 13285 - protein, 10 aa, Artificial Sequence
  Description of Artificial Sequence: Synthetic peptide
SILDIKQGPK

SEQ ID NO: 13286 - protein, 11 aa, Artificial Sequence
  Description of Artificial Sequence: Synthetic peptide
ASQIYPGIRVK

SEQ ID NO: 13287 - protein, 9 aa, Artificial Sequence
  Description of Artificial Sequence: Synthetic peptide
VQQQSNLLK

SEQ ID NO: 13288 - protein, 10 aa, Artificial Sequence
  Description of Artificial Sequence: Synthetic peptide
VVESMNKELK

SEQ ID NO: 13289 - protein, 9 aa, Artificial Sequence
  Description of Artificial Sequence: Synthetic peptide
SNFTSTVVK

SEQ ID NO: 13290 - protein, 9 aa, Artificial Sequence
  Description of Artificial Sequence: Synthetic peptide
KLVSTGIRK

SEQ ID NO: 13291 - protein, 10 aa, Artificial Sequence
  Description of Artificial Sequence: Synthetic peptide
ATSTAIMMQK

SEQ ID NO: 13292 - protein, 10 aa, Artificial Sequence
  Description of Artificial Sequence: Synthetic peptide
ATGAAIMMQK

SEQ ID NO: 13293 - protein, 10 aa, Artificial Sequence
  Description of Artificial Sequence: Synthetic peptide
VTSTSILMQK

SEQ ID NO: 13294 - protein, 11 aa, Artificial Sequence
  Description of Artificial Sequence: Synthetic peptide
ATGTVLGDIRK

SEQ ID NO: 13295 - protein, 10 aa, Artificial Sequence
  Description of Artificial Sequence: Synthetic peptide
VTATSVLMQK

SEQ ID NO: 13296 - protein, 9 aa, Artificial Sequence
  Description of Artificial Sequence: Synthetic peptide
TSTSILMQK

SEQ ID NO: 13297 - protein, 9 aa, Artificial Sequence
  Description of Artificial Sequence: Synthetic peptide
QIYPGIRVK

SEQ ID NO: 13298 - protein, 9 aa, Artificial Sequence
  Description of Artificial Sequence: Synthetic peptide
TATSVLMQK

SEQ ID NO: 13299 - protein, 10 aa, Artificial Sequence
  Description of Artificial Sequence: Synthetic peptide
IVQQQNNLLK

SEQ ID NO: 13300 - protein, 11 aa, Artificial Sequence
  Description of Artificial Sequence: Synthetic peptide
ATGEIIGDIRK

SEQ ID NO: 13301 - protein, 11 aa, Artificial Sequence
  Description of Artificial Sequence: Synthetic peptide
QVTSTSILMQK

SEQ ID NO: 13302 - protein, 10 aa, Artificial Sequence
  Description of Artificial Sequence: Synthetic peptide
IVQQQSNLLK

SEQ ID NO: 13303 - protein, 10 aa, Artificial Sequence
  Description of Artificial Sequence: Synthetic peptide
ATNMTNAMNR

SEQ ID NO: 13304 - protein, 10 aa, Artificial Sequence
  Description of Artificial Sequence: Synthetic peptide
GSNFTSAVVK

SEQ ID NO: 13305 - protein, 9 aa, Artificial Sequence
  Description of Artificial Sequence: Synthetic peptide
QIIEQLIQK

SEQ ID NO: 13306 - protein, 10 aa, Artificial Sequence
  Description of Artificial Sequence: Synthetic peptide
TVQAIQLPNK

SEQ ID NO: 13307 - protein, 9 aa, Artificial Sequence
  Description of Artificial Sequence: Synthetic peptide
TSTAIMMQK

SEQ ID NO: 13308 - protein, 9 aa, Artificial Sequence
  Description of Artificial Sequence: Synthetic peptide
ATADKGVSK

SEQ ID NO: 13309 - protein, 8 aa, Artificial Sequence
  Description of Artificial Sequence: Synthetic peptide
ATSVLMQK

SEQ ID NO: 13310 - protein, 11 aa, Artificial Sequence
  Description of Artificial Sequence: Synthetic peptide
QVTATSVLMQK

SEQ ID NO: 13311 - protein, 10 aa, Artificial Sequence
  Description of Artificial Sequence: Synthetic peptide
GSNFTSTVVK

SEQ ID NO: 13312 - protein, 9 aa, Artificial Sequence
  Description of Artificial Sequence: Synthetic peptide
SNYTGTIYK

SEQ ID NO: 13313 - protein, 8 aa, Artificial Sequence
  Description of Artificial Sequence: Synthetic peptide
STAIMMQK

SEQ ID NO: 13314 - protein, 11 aa, Artificial Sequence
  Description of Artificial Sequence: Synthetic peptide
TVNDIQKLVGK

SEQ ID NO: 13315 - protein, 9 aa, Artificial Sequence
  Description of Artificial Sequence: Synthetic peptide
SSIETVPVK

SEQ ID NO: 13316 - protein, 10 aa, Artificial Sequence
  Description of Artificial Sequence: Synthetic peptide
CTINGTLWNK

SEQ ID NO: 13317 - protein, 9 aa, Artificial Sequence
  Description of Artificial Sequence: Synthetic peptide
APAGFAILK

SEQ ID NO: 13318 - protein, 9 aa, Artificial Sequence
  Description of Artificial Sequence: Synthetic peptide
AVLYYVHQK

SEQ ID NO: 13319 - protein, 9 aa, Artificial Sequence
  Description of Artificial Sequence: Synthetic peptide
AVDLSHFLK

SEQ ID NO: 13320 - protein, 8 aa, Artificial Sequence
  Description of Artificial Sequence: Synthetic peptide
STSILMQK

SEQ ID NO: 13321 - protein, 10 aa, Artificial Sequence
  Description of Artificial Sequence: Synthetic peptide
TVQPIQLPEK

SEQ ID NO: 13322 - protein, 9 aa, Artificial Sequence
  Description of Artificial Sequence: Synthetic peptide
SITGLILTR

SEQ ID NO: 13323 - protein, 9 aa, Artificial Sequence
  Description of Artificial Sequence: Synthetic peptide
STLTQACPK

SEQ ID NO: 13324 - protein, 11 aa, Artificial Sequence
  Description of Artificial Sequence: Synthetic peptide
ATGEIIGDTRK

SEQ ID NO: 13325 - protein, 9 aa, Artificial Sequence
  Description of Artificial Sequence: Synthetic peptide
QIYPGIRIK

SEQ ID NO: 13326 - protein, 9 aa, Artificial Sequence
  Description of Artificial Sequence: Synthetic peptide
ASDAKAYEK

SEQ ID NO: 13327 - protein, 9 aa, Artificial Sequence
  Description of Artificial Sequence: Synthetic peptide
SNFTSTVVK

SEQ ID NO: 13328 - protein, 9 aa, Artificial Sequence
  Description of Artificial Sequence: Synthetic peptide
TGAAIMMQK

SEQ ID NO: 13329 - protein, 9 aa, Artificial Sequence
  Description of Artificial Sequence: Synthetic peptide
STVTQACPK

SEQ ID NO: 13330 - protein, 10 aa, Artificial Sequence
  Description of Artificial Sequence: Synthetic peptide
KTFNGTGLCR

SEQ ID NO: 13331 - protein, 10 aa, Artificial Sequence
  Description of Artificial Sequence: Synthetic peptide
AQEDIIIRSK

SEQ ID NO: 13332 - protein, 9 aa, Artificial Sequence
  Description of Artificial Sequence: Synthetic peptide
TINGTLWNK

SEQ ID NO: 13333 - protein, 10 aa, Artificial Sequence
  Description of Artificial Sequence: Synthetic peptide
ATGEIIGDTR

SEQ ID NO: 13334 - protein, 9 aa, Artificial Sequence
  Description of Artificial Sequence: Synthetic peptide
ALTALITPK

SEQ ID NO: 13335 - protein, 10 aa, Artificial Sequence
  Description of Artificial Sequence: Synthetic peptide
AAVDLSHFLK

SEQ ID NO: 13336 - protein, 9 aa, Artificial Sequence
  Description of Artificial Sequence: Synthetic peptide
APAGYAILK

SEQ ID NO: 13337 - protein, 10 aa, Artificial Sequence
  Description of Artificial Sequence: Synthetic peptide
SVLMQKSNFK

SEQ ID NO: 13338 - protein, 11 aa, Artificial Sequence
  Description of Artificial Sequence: Synthetic peptide
ATDIQTKELQK

SEQ ID NO: 13339 - protein, 9 aa, Artificial Sequence
  Description of Artificial Sequence: Synthetic peptide
VQQQNNLLK

SEQ ID NO: 13340 - protein, 9 aa, Artificial Sequence
  Description of Artificial Sequence: Synthetic peptide
SNFTSAVVK

SEQ ID NO: 13341 - protein, 9 aa, Artificial Sequence
  Description of Artificial Sequence: Synthetic peptide
AIFQSSMTK

SEQ ID NO: 13342 - protein, 9 aa, Artificial Sequence
  Description of Artificial Sequence: Synthetic peptide
ALTALVTPK

SEQ ID NO: 13343 - protein, 10 aa, Artificial Sequence
  Description of Artificial Sequence: Synthetic peptide
ATESIVIWGK

SEQ ID NO: 13344 - protein, 8 aa, Artificial Sequence
  Description of Artificial Sequence: Synthetic peptide
HDIVPIEK

SEQ ID NO: 13345 - protein, 10 aa, Artificial Sequence
  Description of Artificial Sequence: Synthetic peptide
AMYAPPIAGK

SEQ ID NO: 13346 - protein, 10 aa, Artificial Sequence
  Description of Artificial Sequence: Synthetic peptide
ASMTLTVQAR

SEQ ID NO: 13347 - protein, 10 aa, Artificial Sequence
  Description of Artificial Sequence: Synthetic peptide
SSITGLILTR

SEQ ID NO: 13348 - protein, 9 aa, Artificial Sequence
  Description of Artificial Sequence: Synthetic peptide
GTVLGDIRK

SEQ ID NO: 13349 - protein, 11 aa, Artificial Sequence
  Description of Artificial Sequence: Synthetic peptide
VVPLTETTNQK

SEQ ID NO: 13350 - protein, 11 aa, Artificial Sequence
  Description of Artificial Sequence: Synthetic peptide
SSLQTGSEELK

SEQ ID NO: 13351 - protein, 9 aa, Artificial Sequence
  Description of Artificial Sequence: Synthetic peptide
KQLTEVVQK

SEQ ID NO: 13352 - protein, 11 aa, Artificial Sequence
  Description of Artificial Sequence: Synthetic peptide
VVSLTETTNQK

SEQ ID NO: 13353 - protein, 9 aa, Artificial Sequence
  Description of Artificial Sequence: Synthetic peptide
VQQQSNLLK

SEQ ID NO: 13354 - protein, 10 aa, Artificial Sequence
  Description of Artificial Sequence: Synthetic peptide
AALDLSHFLK

SEQ ID NO: 13355 - protein, 10 aa, Artificial Sequence
  Description of Artificial Sequence: Synthetic peptide
ATEGIVIWGK

SEQ ID NO: 13356 - protein, 10 aa, Artificial Sequence
  Description of Artificial Sequence: Synthetic peptide
GAVDLSHFLK

SEQ ID NO: 13357 - protein, 8 aa, Artificial Sequence
  Description of Artificial Sequence: Synthetic peptide
PAGYAILK

SEQ ID NO: 13358 - protein, 9 aa, Artificial Sequence
  Description of Artificial Sequence: Synthetic peptide
GVQAIIRTL

SEQ ID NO: 13359 - protein, 10 aa, Artificial Sequence
  Description of Artificial Sequence: Synthetic peptide
TVQAIQLPDK

SEQ ID NO: 13360 - protein, 9 aa, Artificial Sequence
  Description of Artificial Sequence: Synthetic peptide
SSEVHIPLK

SEQ ID NO: 13361 - protein, 9 aa, Artificial Sequence
  Description of Artificial Sequence: Synthetic peptide
KSSIVGWPK

SEQ ID NO: 13362 - protein, 11 aa, Artificial Sequence
  Description of Artificial Sequence: Synthetic peptide
GVVESMNKELK

SEQ ID NO: 13363 - protein, 11 aa, Artificial Sequence
  Description of Artificial Sequence: Synthetic peptide
RIEPVGVAPTK

SEQ ID NO: 13364 - protein, 10 aa, Artificial Sequence
  Description of Artificial Sequence: Synthetic peptide
STMGAAAITL

SEQ ID NO: 13365 - protein, 10 aa, Artificial Sequence
  Description of Artificial Sequence: Synthetic peptide
SQIYPGIRVK

SEQ ID NO: 13366 - protein, 9 aa, Artificial Sequence
  Description of Artificial Sequence: Synthetic peptide
AQYWGQELK

SEQ ID NO: 13367 - protein, 10 aa, Artificial Sequence
  Description of Artificial Sequence: Synthetic peptide
ISNYTGTIYK

SEQ ID NO: 13368 - protein, 10 aa, Artificial Sequence
  Description of Artificial Sequence: Synthetic peptide
SILDIKQGPK

SEQ ID NO: 13369 - protein, 9 aa, Artificial Sequence
  Description of Artificial Sequence: Synthetic peptide
CTRPTNITR

SEQ ID NO: 13370 - protein, 9 aa, Artificial Sequence
  Description of Artificial Sequence: Synthetic peptide
QVPPLISLK

SEQ ID NO: 13371 - protein, 9 aa, Artificial Sequence
  Description of Artificial Sequence: Synthetic peptide
NYTGTIYKL

SEQ ID NO: 13372 - protein, 9 aa, Artificial Sequence
  Description of Artificial Sequence: Synthetic peptide
NYTDTIYRL

SEQ ID NO: 13373 - protein, 9 aa, Artificial Sequence
  Description of Artificial Sequence: Synthetic peptide
VYIEYKKQL

SEQ ID NO: 13374 - protein, 10 aa, Artificial Sequence
  Description of Artificial Sequence: Synthetic peptide
IFLDNVTENF

SEQ ID NO: 13375 - protein, 9 aa, Artificial Sequence
  Description of Artificial Sequence: Synthetic peptide
NYTKTIYSL

SEQ ID NO: 13376 - protein, 9 aa, Artificial Sequence
  Description of Artificial Sequence: Synthetic peptide
VYIEYKKLL

SEQ ID NO: 13377 - protein, 9 aa, Artificial Sequence
  Description of Artificial Sequence: Synthetic peptide
KYLGNLAQY

SEQ ID NO: 13378 - protein, 9 aa, Artificial Sequence
  Description of Artificial Sequence: Synthetic peptide
VYLEYKKLL

SEQ ID NO: 13379 - protein, 9 aa, Artificial Sequence
  Description of Artificial Sequence: Synthetic peptide
YYVHQKIQI

SEQ ID NO: 13380 - protein, 9 aa, Artificial Sequence
  Description of Artificial Sequence: Synthetic peptide
RYLKDQQLL

SEQ ID NO: 13381 - protein, 9 aa, Artificial Sequence
  Description of Artificial Sequence: Synthetic peptide
TLIKIATEF

SEQ ID NO: 13382 - protein, 10 aa, Artificial Sequence
  Description of Artificial Sequence: Synthetic peptide
LFIPGNINNL

SEQ ID NO: 13383 - protein, 10 aa, Artificial Sequence
  Description of Artificial Sequence: Synthetic peptide
KYLWNLTQHW

SEQ ID NO: 13384 - protein, 10 aa, Artificial Sequence
  Description of Artificial Sequence: Synthetic peptide
AYDPEVHNVW

SEQ ID NO: 13385 - protein, 9 aa, Artificial Sequence
  Description of Artificial Sequence: Synthetic peptide
IYQEPYKNL

SEQ ID NO: 13386 - protein, 9 aa, Artificial Sequence
  Description of Artificial Sequence: Synthetic peptide
NYTDTIYRL

SEQ ID NO: 13387 - protein, 9 aa, Artificial Sequence
  Description of Artificial Sequence: Synthetic peptide
NYTGTIYKL

SEQ ID NO: 13388 - protein, 9 aa, Artificial Sequence
  Description of Artificial Sequence: Synthetic peptide
FYKLDVVQI

SEQ ID NO: 13389 - protein, 9 aa, Artificial Sequence
  Description of Artificial Sequence: Synthetic peptide
VYIEYKKQL

SEQ ID NO: 13390 - protein, 9 aa, Artificial Sequence
  Description of Artificial Sequence: Synthetic peptide
NYTKTIYSL

SEQ ID NO: 13391 - protein, 9 aa, Artificial Sequence
  Description of Artificial Sequence: Synthetic peptide
RYLKDQQLL

SEQ ID NO: 13392 - protein, 9 aa, Artificial Sequence
  Description of Artificial Sequence: Synthetic peptide
FIPGNINNL

SEQ ID NO: 13393 - protein, 9 aa, Artificial Sequence
  Description of Artificial Sequence: Synthetic peptide
IYQEPYKNL

SEQ ID NO: 13394 - protein, 9 aa, Artificial Sequence
  Description of Artificial Sequence: Synthetic peptide
IYNTYGDTW

SEQ ID NO: 13395 - protein, 9 aa, Artificial Sequence
  Description of Artificial Sequence: Synthetic peptide
VYIEYKKLL

SEQ ID NO: 13396 - protein, 10 aa, Artificial Sequence
  Description of Artificial Sequence: Synthetic peptide
AYDPEVHNVW

SEQ ID NO: 13397 - protein, 9 aa, Artificial Sequence
  Description of Artificial Sequence: Synthetic peptide
YYDPSKDLI

SEQ ID NO: 13398 - protein, 10 aa, Artificial Sequence
  Description of Artificial Sequence: Synthetic peptide
EISERILTTY

SEQ ID NO: 13399 - protein, 10 aa, Artificial Sequence
  Description of Artificial Sequence: Synthetic peptide
DTINEEAAEW

SEQ ID NO: 13400 - protein, 10 aa, Artificial Sequence
  Description of Artificial Sequence: Synthetic peptide
EVVDPKIDPW

SEQ ID NO: 13401 - protein, 9 aa, Artificial Sequence
  Description of Artificial Sequence: Synthetic peptide
EVIPMFSAL

SEQ ID NO: 13402 - protein, 10 aa, Artificial Sequence
  Description of Artificial Sequence: Synthetic peptide
EVVDPNLDPW

SEQ ID NO: 13403 - protein, 10 aa, Artificial Sequence
  Description of Artificial Sequence: Synthetic peptide
EIIGDIRKAY

SEQ ID NO: 13404 - protein, 10 aa, Artificial Sequence
  Description of Artificial Sequence: Synthetic peptide
EVQKQGHDQW

SEQ ID NO: 13405 - protein, 10 aa, Artificial Sequence
  Description of Artificial Sequence: Synthetic peptide
EQATQEVKGW

SEQ ID NO: 13406 - protein, 10 aa, Artificial Sequence
  Description of Artificial Sequence: Synthetic peptide
EQASQEVKGW

SEQ ID NO: 13407 - protein, 9 aa, Artificial Sequence
  Description of Artificial Sequence: Synthetic peptide
EMYPPLTSL

SEQ ID NO: 13408 - protein, 9 aa, Artificial Sequence
  Description of Artificial Sequence: Synthetic peptide
DIAGTTSTL

SEQ ID NO: 13409 - protein, 9 aa, Artificial Sequence
  Description of Artificial Sequence: Synthetic peptide
NVTENFNMW

SEQ ID NO: 13410 - protein, 9 aa, Artificial Sequence
  Description of Artificial Sequence: Synthetic peptide
EVHNVWATY

SEQ ID NO: 13411 - protein, 9 aa, Artificial Sequence
  Description of Artificial Sequence: Synthetic peptide
EQAPPLVSL

SEQ ID NO: 13412 - protein, 9 aa, Artificial Sequence
  Description of Artificial Sequence: Synthetic peptide
DSKLVIVSY

SEQ ID NO: 13413 - protein, 10 aa, Artificial Sequence
  Description of Artificial Sequence: Synthetic peptide
EISNYTGTIY

SEQ ID NO: 13414 - protein, 10 aa, Artificial Sequence
  Description of Artificial Sequence: Synthetic peptide
EVNIVTDSQY

SEQ ID NO: 13415 - protein, 10 aa, Artificial Sequence
  Description of Artificial Sequence: Synthetic peptide
EISERILTTY

SEQ ID NO: 13416 - protein, 10 aa, Artificial Sequence
  Description of Artificial Sequence: Synthetic peptide
EVNIVTDSQY

SEQ ID NO: 13417 - protein, 9 aa, Artificial Sequence
  Description of Artificial Sequence: Synthetic peptide
ETKIGKAGY

SEQ ID NO: 13418 - protein, 9 aa, Artificial Sequence
  Description of Artificial Sequence: Synthetic peptide
EVIPMFSAL

SEQ ID NO: 13419 - protein, 10 aa, Artificial Sequence
  Description of Artificial Sequence: Synthetic peptide
EIIGDIRKAY

SEQ ID NO: 13420 - protein, 9 aa, Artificial Sequence
  Description of Artificial Sequence: Synthetic peptide
EVHNVWATY

SEQ ID NO: 13421 - protein, 9 aa, Artificial Sequence
  Description of Artificial Sequence: Synthetic peptide
ETKLGKAGY

SEQ ID NO: 13422 - protein, 9 aa, Artificial Sequence
  Description of Artificial Sequence: Synthetic peptide
ETPGIRYQY

SEQ ID NO: 13423 - protein, 9 aa, Artificial Sequence
  Description of Artificial Sequence: Synthetic peptide
FIPGNINNL

SEQ ID NO: 13424 - protein, 11 aa, Artificial Sequence
  Description of Artificial Sequence: Synthetic peptide
EIIKEPVHGVY

SEQ ID NO: 13425 - protein, 10 aa, Artificial Sequence
  Description of Artificial Sequence: Synthetic peptide
EISNYTGTIY

SEQ ID NO: 13426 - protein, 10 aa, Artificial Sequence
  Description of Artificial Sequence: Synthetic peptide
EVIPAETGQE

SEQ ID NO: 13427 - protein, 9 aa, Artificial Sequence
  Description of Artificial Sequence: Synthetic peptide
YTPGPGTRY

SEQ ID NO: 13428 - protein, 9 aa, Artificial Sequence
  Description of Artificial Sequence: Synthetic peptide
EIIGDIRKA

SEQ ID NO: 13429 - protein, 9 aa, Artificial Sequence
  Description of Artificial Sequence: Synthetic peptide
EVSQNYPIV

SEQ ID NO: 13430 - protein, 9 aa, Artificial Sequence
  Description of Artificial Sequence: Synthetic peptide
EVIPAETGQ

SEQ ID NO: 13431 - protein, 9 aa, Artificial Sequence
  Description of Artificial Sequence: Synthetic peptide
NTKNIIVQF

SEQ ID NO: 13432 - protein, 9 aa, Artificial Sequence
  Description of Artificial Sequence: Synthetic peptide
DQYNKTVGF

SEQ ID NO: 13433 - protein, 10 aa, Artificial Sequence
  Description of Artificial Sequence: Synthetic peptide
FTSKGLGISY

SEQ ID NO: 13434 - protein, 10 aa, Artificial Sequence
  Description of Artificial Sequence: Synthetic peptide
EISERILTTY

SEQ ID NO: 13435 - protein, 9 aa, Artificial Sequence
  Description of Artificial Sequence: Synthetic peptide
EVIPMFSAL

SEQ ID NO: 13436 - protein, 9 aa, Artificial Sequence
  Description of Artificial Sequence: Synthetic peptide
FIPGNINNL

SEQ ID NO: 13437 - protein, 9 aa, Artificial Sequence
  Description of Artificial Sequence: Synthetic peptide
NTKNIIVQF

SEQ ID NO: 13438 - protein, 9 aa, Artificial Sequence
  Description of Artificial Sequence: Synthetic peptide
DIAGTTSNL

SEQ ID NO: 13439 - protein, 10 aa, Artificial Sequence
  Description of Artificial Sequence: Synthetic peptide
EVNIVTDSQY

SEQ ID NO: 13440 - protein, 9 aa, Artificial Sequence
  Description of Artificial Sequence: Synthetic peptide
DIAGTTSTL

SEQ ID NO: 13441 - protein, 9 aa, Artificial Sequence
  Description of Artificial Sequence: Synthetic peptide
NTKTIIVQF

SEQ ID NO: 13442 - protein, 9 aa, Artificial Sequence
  Description of Artificial Sequence: Synthetic peptide
EQAPPLVSL

SEQ ID NO: 13443 - protein, 9 aa, Artificial Sequence
  Description of Artificial Sequence: Synthetic peptide
DQYNKTVGF

SEQ ID NO: 13444 - protein, 9 aa, Artificial Sequence
  Description of Artificial Sequence: Synthetic peptide
EVHNVWATY

SEQ ID NO: 13445 - protein, 9 aa, Artificial Sequence
  Description of Artificial Sequence: Synthetic peptide
EMYPPLTSL

SEQ ID NO: 13446 - protein, 10 aa, Artificial Sequence
  Description of Artificial Sequence: Synthetic peptide
EVVDPKIDPW

SEQ ID NO: 13447 - protein, 9 aa, Artificial Sequence
  Description of Artificial Sequence: Synthetic peptide
EVIPMFSAL

SEQ ID NO: 13448 - protein, 9 aa, Artificial Sequence
  Description of Artificial Sequence: Synthetic peptide
EIIGDIRKA

SEQ ID NO: 13449 - protein, 9 aa, Artificial Sequence
  Description of Artificial Sequence: Synthetic peptide
EIIGDTRKA

SEQ ID NO: 13450 - protein, 10 aa, Artificial Sequence
  Description of Artificial Sequence: Synthetic peptide
EIIGDIRKAY

SEQ ID NO: 13451 - protein, 9 aa, Artificial Sequence
  Description of Artificial Sequence: Synthetic peptide
FIPGNINNL

SEQ ID NO: 13452 - protein, 9 aa, Artificial Sequence
  Description of Artificial Sequence: Synthetic peptide
EVHNVWATY

SEQ ID NO: 13453 - protein, 9 aa, Artificial Sequence
  Description of Artificial Sequence: Synthetic peptide
DIAGTTSNL

SEQ ID NO: 13454 - protein, 11 aa, Artificial Sequence
  Description of Artificial Sequence: Synthetic peptide
ETFYVDGAASR

SEQ ID NO: 13455 - protein, 10 aa, Artificial Sequence
  Description of Artificial Sequence: Synthetic peptide
EVTTHSFNCR

SEQ ID NO: 13456 - protein, 9 aa, Artificial Sequence
  Description of Artificial Sequence: Synthetic peptide
MVHQAISPR

SEQ ID NO: 13457 - protein, 10 aa, Artificial Sequence
  Description of Artificial Sequence: Synthetic peptide
EIIKEPVHGV

SEQ ID NO: 13458 - protein, 10 aa, Artificial Sequence
  Description of Artificial Sequence: Synthetic peptide
EISERILTTY

SEQ ID NO: 13459 - protein, 9 aa, Artificial Sequence
  Description of Artificial Sequence: Synthetic peptide
DIAGTTSTL

SEQ ID NO: 13460 - protein, 9 aa, Artificial Sequence
  Description of Artificial Sequence: Synthetic peptide
SITGLILTR

SEQ ID NO: 13461 - protein, 9 aa, Artificial Sequence
  Description of Artificial Sequence: Synthetic peptide
EMYPPLTSL

SEQ ID NO: 13462 - protein, 9 aa, Artificial Sequence
  Description of Artificial Sequence: Synthetic peptide
EIHNVWATY

SEQ ID NO: 13463 - protein, 9 aa, Artificial Sequence
  Description of Artificial Sequence: Synthetic peptide
EVHQDPVSK

SEQ ID NO: 13464 - protein, 9 aa, Artificial Sequence
  Description of Artificial Sequence: Synthetic peptide
MVHQALSPR

SEQ ID NO: 13465 - protein, 9 aa, Artificial Sequence
  Description of Artificial Sequence: Synthetic peptide
TVLDVGDAY

SEQ ID NO: 13466 - protein, 9 aa, Artificial Sequence
  Description of Artificial Sequence: Synthetic peptide
SFDPIPIHY

SEQ ID NO: 13467 - protein, 9 aa, Artificial Sequence
  Description of Artificial Sequence: Synthetic peptide
LYNTVAVLY

SEQ ID NO: 13468 - protein, 11 aa, Artificial Sequence
  Description of Artificial Sequence: Synthetic peptide
AAADKGVSQNY

SEQ ID NO: 13469 - protein, 9 aa, Artificial Sequence
  Description of Artificial Sequence: Synthetic peptide
YNAVVVLYY

SEQ ID NO: 13470 - protein, 9 aa, Artificial Sequence
  Description of Artificial Sequence: Synthetic peptide
LYNAVVVLY

SEQ ID NO: 13471 - protein, 9 aa, Artificial Sequence
  Description of Artificial Sequence: Synthetic peptide
SFDPIPIYY

SEQ ID NO: 13472 - protein, 10 aa, Artificial Sequence
  Description of Artificial Sequence: Synthetic peptide
VSFDPIPIYY

SEQ ID NO: 13473 - protein, 9 aa, Artificial Sequence
  Description of Artificial Sequence: Synthetic peptide
LFNTIVVLY

SEQ ID NO: 13474 - protein, 10 aa, Artificial Sequence
  Description of Artificial Sequence: Synthetic peptide
VSFDPIPIHY

SEQ ID NO: 13475 - protein, 9 aa, Artificial Sequence
  Description of Artificial Sequence: Synthetic peptide
VWTIVYLEY

SEQ ID NO: 13476 - protein, 9 aa, Artificial Sequence
  Description of Artificial Sequence: Synthetic peptide
LYNTVAVLY

SEQ ID NO: 13477 - protein, 9 aa, Artificial Sequence
  Description of Artificial Sequence: Synthetic peptide
SFDPIPIHY

SEQ ID NO: 13478 - protein, 9 aa, Artificial Sequence
  Description of Artificial Sequence: Synthetic peptide
FNTIVVLYY

SEQ ID NO: 13479 - protein, 9 aa, Artificial Sequence
  Description of Artificial Sequence: Synthetic peptide
SFDPIPIYY

SEQ ID NO: 13480 - protein, 9 aa, Artificial Sequence
  Description of Artificial Sequence: Synthetic peptide
GYFPDWQNY

SEQ ID NO: 13481 - protein, 9 aa, Artificial Sequence
  Description of Artificial Sequence: Synthetic peptide
YNAVVVLYY

SEQ ID NO: 13482 - protein, 9 aa, Artificial Sequence
  Description of Artificial Sequence: Synthetic peptide
LFNTIVVLY

SEQ ID NO: 13483 - protein, 10 aa, Artificial Sequence
  Description of Artificial Sequence: Synthetic peptide
VSFDPIPIYY

SEQ ID NO: 13484 - protein, 9 aa, Artificial Sequence
  Description of Artificial Sequence: Synthetic peptide
LYNAVVVLY

SEQ ID NO: 13485 - protein, 10 aa, Artificial Sequence
  Description of Artificial Sequence: Synthetic peptide
VSFDPIPIHY

SEQ ID NO: 13486 - protein, 9 aa, Artificial Sequence
  Description of Artificial Sequence: Synthetic peptide
YNTVAVLYY

SEQ ID NO: 13487 - protein, 9 aa, Artificial Sequence
  Description of Artificial Sequence: Synthetic peptide
VWTIVYIEY

SEQ ID NO: 13488 - protein, 10 aa, Artificial Sequence
  Description of Artificial Sequence: Synthetic peptide
LYNTVAVLYY

SEQ ID NO: 13489 - protein, 10 aa, Artificial Sequence
  Description of Artificial Sequence: Synthetic peptide
GVSKGVSQNY

SEQ ID NO: 13490 - protein, 11 aa, Artificial Sequence
  Description of Artificial Sequence: Synthetic peptide
GLADQLIHLHY

SEQ ID NO: 13491 - protein, 10 aa, Artificial Sequence
  Description of Artificial Sequence: Synthetic peptide
LFNTIVVLYY

SEQ ID NO: 13492 - protein, 9 aa, Artificial Sequence
  Description of Artificial Sequence: Synthetic peptide
TVLDVGDAY

SEQ ID NO: 13493 - protein, 10 aa, Artificial Sequence
  Description of Artificial Sequence: Synthetic peptide
FTSKGLGISY

SEQ ID NO: 13494 - protein, 9 aa, Artificial Sequence
  Description of Artificial Sequence: Synthetic peptide
KVKPPLPSV

SEQ ID NO: 13495 - protein, 10 aa, Artificial Sequence
  Description of Artificial Sequence: Synthetic peptide
KEMYPPLTSL

SEQ ID NO: 13496 - protein, 10 aa, Artificial Sequence
  Description of Artificial Sequence: Synthetic peptide
KEQVPPLISL

SEQ ID NO: 13497 - protein, 10 aa, Artificial Sequence
  Description of Artificial Sequence: Synthetic peptide
EEQAPPLVSL

SEQ ID NO: 13498 - protein, 9 aa, Artificial Sequence
  Description of Artificial Sequence: Synthetic peptide
VVRIEPVGV

SEQ ID NO: 13499 - protein, 9 aa, Artificial Sequence
  Description of Artificial Sequence: Synthetic peptide
KIKPPLPSV

SEQ ID NO: 13500 - protein, 9 aa, Artificial Sequence
  Description of Artificial Sequence: Synthetic peptide
SESAIRNAI

SEQ ID NO: 13501 - protein, 10 aa, Artificial Sequence
  Description of Artificial Sequence: Synthetic peptide
TEKGVGSPQI

SEQ ID NO: 13502 - protein, 9 aa, Artificial Sequence
  Description of Artificial Sequence: Synthetic peptide
VSKGVSQNY

SEQ ID NO: 13503 - protein, 10 aa, Artificial Sequence
  Description of Artificial Sequence: Synthetic peptide
VQINNSNTSY

SEQ ID NO: 13504 - protein, 9 aa, Artificial Sequence
  Description of Artificial Sequence: Synthetic peptide
TSKGLGISY

SEQ ID NO: 13505 - protein, 10 aa, Artificial Sequence
  Description of Artificial Sequence: Synthetic peptide
GVSKGVSQNY

SEQ ID NO: 13506 - protein, 11 aa, Artificial Sequence
  Description of Artificial Sequence: Synthetic peptide
AAADKGVSQNY

SEQ ID NO: 13507 - protein, 11 aa, Artificial Sequence
  Description of Artificial Sequence: Synthetic peptide
QTGSEELKSLY

SEQ ID NO: 13508 - protein, 11 aa, Artificial Sequence
  Description of Artificial Sequence: Synthetic peptide
KAADKEVSQNY

SEQ ID NO: 13509 - protein, 11 aa, Artificial Sequence
  Description of Artificial Sequence: Synthetic peptide
QTGSEEIKSLY

SEQ ID NO: 13510 - protein, 11 aa, Artificial Sequence
  Description of Artificial Sequence: Synthetic peptide
VVQINNSNTSY

SEQ ID NO: 13511 - protein, 9 aa, Artificial Sequence
  Description of Artificial Sequence: Synthetic peptide
TVLDVGDAY

SEQ ID NO: 13512 - protein, 9 aa, Artificial Sequence
  Description of Artificial Sequence: Synthetic peptide
KLQEEQDKY

SEQ ID NO: 13513 - protein, 10 aa, Artificial Sequence
  Description of Artificial Sequence: Synthetic peptide
GLADQLIHKY

SEQ ID NO: 13514 - protein, 9 aa, Artificial Sequence
  Description of Artificial Sequence: Synthetic peptide
QINNSNTSY

SEQ ID NO: 13515 - protein, 10 aa, Artificial Sequence
  Description of Artificial Sequence: Synthetic peptide
ILKEPVHGVY

SEQ ID NO: 13516 - protein, 9 aa, Artificial Sequence
  Description of Artificial Sequence: Synthetic peptide
KYLGNLAQY

SEQ ID NO: 13517 - protein, 10 aa, Artificial Sequence
  Description of Artificial Sequence: Synthetic peptide
IIKEPVHGVY

SEQ ID NO: 13518 - protein, 9 aa, Artificial Sequence
  Description of Artificial Sequence: Synthetic peptide
KAQEEHEKY

SEQ ID NO: 13519 - protein, 10 aa, Artificial Sequence
  Description of Artificial Sequence: Synthetic peptide
FTSKGLGISY

SEQ ID NO: 13520 - protein, 9 aa, Artificial Sequence
  Description of Artificial Sequence: Synthetic peptide
VSKGVSQNY

SEQ ID NO: 13521 - protein, 10 aa, Artificial Sequence
  Description of Artificial Sequence: Synthetic peptide
GVSKGVSQNY

SEQ ID NO: 13522 - protein, 10 aa, Artificial Sequence
  Description of Artificial Sequence: Synthetic peptide
KIATEFKDQY

SEQ ID NO: 13523 - protein, 9 aa, Artificial Sequence
  Description of Artificial Sequence: Synthetic peptide
TSKGLGISY

SEQ ID NO: 13524 - protein, 11 aa, Artificial Sequence
  Description of Artificial Sequence: Synthetic peptide
QTGSEEIKSLY

SEQ ID NO: 13525 - protein, 11 aa, Artificial Sequence
  Description of Artificial Sequence: Synthetic peptide
KAADKEVSQNY

SEQ ID NO: 13526 - protein, 10 aa, Artificial Sequence
  Description of Artificial Sequence: Synthetic peptide
GLADQLIHKY

SEQ ID NO: 13527 - protein, 10 aa, Artificial Sequence
  Description of Artificial Sequence: Synthetic peptide
FTSKGLGISY

SEQ ID NO: 13528 - protein, 11 aa, Artificial Sequence
  Description of Artificial Sequence: Synthetic peptide
AAADKGVSQNY

SEQ ID NO: 13529 - protein, 9 aa, Artificial Sequence
  Description of Artificial Sequence: Synthetic peptide
VVNRVRQGY

SEQ ID NO: 13530 - protein, 11 aa, Artificial Sequence
  Description of Artificial Sequence: Synthetic peptide
QTGSEELKSLY

SEQ ID NO: 13531 - protein, 9 aa, Artificial Sequence
  Description of Artificial Sequence: Synthetic peptide
CTRPTNITR

SEQ ID NO: 13532 - protein, 10 aa, Artificial Sequence
  Description of Artificial Sequence: Synthetic peptide
ATNMTNAMNR

SEQ ID NO: 13533 - protein, 11 aa, Artificial Sequence
  Description of Artificial Sequence: Synthetic peptide
RGRPGNFLQNR

SEQ ID NO: 13534 - protein, 9 aa, Artificial Sequence
  Description of Artificial Sequence: Synthetic peptide
RLYERIIER

SEQ ID NO: 13535 - protein, 11 aa, Artificial Sequence
  Description of Artificial Sequence: Synthetic peptide
KGRPGNFLQNR

SEQ ID NO: 13536 - protein, 9 aa, Artificial Sequence
  Description of Artificial Sequence: Synthetic peptide
KTIIVQFNR

SEQ ID NO: 13537 - protein, 9 aa, Artificial Sequence
  Description of Artificial Sequence: Synthetic peptide
KQIVNVWQR

SEQ ID NO: 13538 - protein, 11 aa, Artificial Sequence
  Description of Artificial Sequence: Synthetic peptide
TSKGLGISYGR

SEQ ID NO: 13539 - protein, 9 aa, Artificial Sequence
  Description of Artificial Sequence: Synthetic peptide
KQIVNMWQR

SEQ ID NO: 13540 - protein, 9 aa, Artificial Sequence
  Description of Artificial Sequence: Synthetic peptide
RQIHQISER

SEQ ID NO: 13541 - protein, 10 aa, Artificial Sequence
  Description of Artificial Sequence: Synthetic peptide
KIKPPLPSVR

SEQ ID NO: 13542 - protein, 10 aa, Artificial Sequence
  Description of Artificial Sequence: Synthetic peptide
KTFNGTGLCR

SEQ ID NO: 13543 - protein, 11 aa, Artificial Sequence
  Description of Artificial Sequence: Synthetic peptide
GSKANNTDILR

SEQ ID NO: 13544 - protein, 11 aa, Artificial Sequence
  Description of Artificial Sequence: Synthetic peptide
TVNDIQKLVGK

SEQ ID NO: 13545 - protein, 9 aa, Artificial Sequence
  Description of Artificial Sequence: Synthetic peptide
KGLGISYGR

SEQ ID NO: 13546 - protein, 11 aa, Artificial Sequence
  Description of Artificial Sequence: Synthetic peptide
VGNPQISGESR

SEQ ID NO: 13547 - protein, 9 aa, Artificial Sequence
  Description of Artificial Sequence: Synthetic peptide
RQIVNMWQR

SEQ ID NO: 13548 - protein, 9 aa, Artificial Sequence
  Description of Artificial Sequence: Synthetic peptide
VVLYYVHQR

SEQ ID NO: 13549 - protein, 10 aa, Artificial Sequence
  Description of Artificial Sequence: Synthetic peptide
GGLDGLIYSR

SEQ ID NO: 13550 - protein, 10 aa, Artificial Sequence
  Description of Artificial Sequence: Synthetic peptide
VSKQPLSQTR

SEQ ID NO: 13551 - protein, 11 aa, Artificial Sequence
  Description of Artificial Sequence: Synthetic peptide
KGRPGNFIQSR

SEQ ID NO: 13552 - protein, 9 aa, Artificial Sequence
  Description of Artificial Sequence: Synthetic peptide
VGWPKVRER

SEQ ID NO: 13553 - protein, 9 aa, Artificial Sequence
  Description of Artificial Sequence: Synthetic peptide
RQFVNMWQR

SEQ ID NO: 13554 - protein, 9 aa, Artificial Sequence
  Description of Artificial Sequence: Synthetic peptide
SITGLILTR

SEQ ID NO: 13555 - protein, 9 aa, Artificial Sequence
  Description of Artificial Sequence: Synthetic peptide
VGWPAIRER

SEQ ID NO: 13556 - protein, 11 aa, Artificial Sequence
  Description of Artificial Sequence: Synthetic peptide
VGPTPVNIIGR

SEQ ID NO: 13557 - protein, 10 aa, Artificial Sequence
  Description of Artificial Sequence: Synthetic peptide
AGRAVLNIPR

SEQ ID NO: 13558 - protein, 9 aa, Artificial Sequence
  Description of Artificial Sequence: Synthetic peptide
VGWPNVRER

SEQ ID NO: 13559 - protein, 9 aa, Artificial Sequence
  Description of Artificial Sequence: Synthetic peptide
VVNRVRQGY

SEQ ID NO: 13560 - protein, 9 aa, Artificial Sequence
  Description of Artificial Sequence: Synthetic peptide
IQLPNKSSW

SEQ ID NO: 13561 - protein, 9 aa, Artificial Sequence
  Description of Artificial Sequence: Synthetic peptide
VINRVRQGY

SEQ ID NO: 13562 - protein, 9 aa, Artificial Sequence
  Description of Artificial Sequence: Synthetic peptide
IQLPDKSSW

SEQ ID NO: 13563 - protein, 9 aa, Artificial Sequence
  Description of Artificial Sequence: Synthetic peptide
VSKGVSQNY

SEQ ID NO: 13564 - protein, 10 aa, Artificial Sequence
  Description of Artificial Sequence: Synthetic peptide
AVINRVRQGY

SEQ ID NO: 13565 - protein, 10 aa, Artificial Sequence
  Description of Artificial Sequence: Synthetic peptide
SVVNRVRQGY

SEQ ID NO: 13566 - protein, 9 aa, Artificial Sequence
  Description of Artificial Sequence: Synthetic peptide
KQISKIQNF

SEQ ID NO: 13567 - protein, 9 aa, Artificial Sequence
  Description of Artificial Sequence: Synthetic peptide
IINRVRQGY

SEQ ID NO: 13568 - protein, 9 aa, Artificial Sequence
  Description of Artificial Sequence: Synthetic peptide
DNYTDTIYR

SEQ ID NO: 13569 - protein, 10 aa, Artificial Sequence
  Description of Artificial Sequence: Synthetic peptide
DNNEIKVVPR

SEQ ID NO: 13570 - protein, 11 aa, Artificial Sequence
  Description of Artificial Sequence: Synthetic peptide
ETFYVDGAANR

SEQ ID NO: 13571 - protein, 10 aa, Artificial Sequence
  Description of Artificial Sequence: Synthetic peptide
DNNEIKVIPR

SEQ ID NO: 13572 - protein, 9 aa, Artificial Sequence
  Description of Artificial Sequence: Synthetic peptide
DILSNNHTR

SEQ ID NO: 13573 - protein, 11 aa, Artificial Sequence
  Description of Artificial Sequence: Synthetic peptide
ETFYVDGAASR

SEQ ID NO: 13574 - protein, 9 aa, Artificial Sequence
  Description of Artificial Sequence: Synthetic peptide
TNMTNAMNR

SEQ ID NO: 13575 - protein, 11 aa, Artificial Sequence
  Description of Artificial Sequence: Synthetic peptide
DNSLPEAGAER

SEQ ID NO: 13576 - protein, 11 aa, Artificial Sequence
  Description of Artificial Sequence: Synthetic peptide
DVKQLTEVVQK

SEQ ID NO: 13577 - protein, 10 aa, Artificial Sequence
  Description of Artificial Sequence: Synthetic peptide
DLADQLIHLR

SEQ ID NO: 13578 - protein, 11 aa, Artificial Sequence
  Description of Artificial Sequence: Synthetic peptide
ENLAFQQGEAR

SEQ ID NO: 13579 - protein, 9 aa, Artificial Sequence
  Description of Artificial Sequence: Synthetic peptide
DAWEKIRLR

SEQ ID NO: 13580 - protein, 11 aa, Artificial Sequence
  Description of Artificial Sequence: Synthetic peptide
EARKFSSEQTR

SEQ ID NO: 13581 - protein, 9 aa, Artificial Sequence
  Description of Artificial Sequence: Synthetic peptide
MYAPPIAGK

SEQ ID NO: 13582 - protein, 9 aa, Artificial Sequence
  Description of Artificial Sequence: Synthetic peptide
NNEIKVVPR

SEQ ID NO: 13583 - protein, 9 aa, Artificial Sequence
  Description of Artificial Sequence: Synthetic peptide
QARILAVER

SEQ ID NO: 13584 - protein, 9 aa, Artificial Sequence
  Description of Artificial Sequence: Synthetic peptide
MVHQAISPR

SEQ ID NO: 13585 - protein, 11 aa, Artificial Sequence
  Description of Artificial Sequence: Synthetic peptide
EAWKFSSEQTR

SEQ ID NO: 13586 - protein, 11 aa, Artificial Sequence
  Description of Artificial Sequence: Synthetic peptide
ETFYVDGAANR

SEQ ID NO: 13587 - protein, 11 aa, Artificial Sequence
  Description of Artificial Sequence: Synthetic peptide
ETFYVDGAASR

SEQ ID NO: 13588 - protein, 9 aa, Artificial Sequence
  Description of Artificial Sequence: Synthetic peptide
TNMTNAMNR

SEQ ID NO: 13589 - protein, 9 aa, Artificial Sequence
  Description of Artificial Sequence: Synthetic peptide
MVHQAISPR

SEQ ID NO: 13590 - protein, 9 aa, Artificial Sequence
  Description of Artificial Sequence: Synthetic peptide
ESVKINCTR

SEQ ID NO: 13591 - protein, 9 aa, Artificial Sequence
  Description of Artificial Sequence: Synthetic peptide
EFNGTGLCR

SEQ ID NO: 13592 - protein, 9 aa, Artificial Sequence
  Description of Artificial Sequence: Synthetic peptide
CTRPTNITR

SEQ ID NO: 13593 - protein, 9 aa, Artificial Sequence
  Description of Artificial Sequence: Synthetic peptide
MYAPPIAGK

SEQ ID NO: 13594 - protein, 9 aa, Artificial Sequence
  Description of Artificial Sequence: Synthetic peptide
QARILAVER

SEQ ID NO: 13595 - protein, 9 aa, Artificial Sequence
  Description of Artificial Sequence: Synthetic peptide
FYVDGAANR

SEQ ID NO: 13596 - protein, 9 aa, Artificial Sequence
  Description of Artificial Sequence: Synthetic peptide
MVHQALSPR

SEQ ID NO: 13597 - protein, 9 aa, Artificial Sequence
  Description of Artificial Sequence: Synthetic peptide
MVHQSLSPR

SEQ ID NO: 13598 - protein, 11 aa, Artificial Sequence
  Description of Artificial Sequence: Synthetic peptide
TVNDIQKLVGK

SEQ ID NO: 13599 - protein, 10 aa, Artificial Sequence
  Description of Artificial Sequence: Synthetic peptide
DNNEIKVVPR

SEQ ID NO: 13600 - protein, 9 aa, Artificial Sequence
  Description of Artificial Sequence: Synthetic peptide
EYKKILRQK

SEQ ID NO: 13601 - protein, 11 aa, Artificial Sequence
  Description of Artificial Sequence: Synthetic peptide
EARKFSSEQTR

SEQ ID NO: 13602 - protein, 10 aa, Artificial Sequence
  Description of Artificial Sequence: Synthetic peptide
DNNEIKVIPR

SEQ ID NO: 13603 - protein, 9 aa, Artificial Sequence
  Description of Artificial Sequence: Synthetic peptide
EVHQDPVSK

SEQ ID NO: 13604 - protein, 9 aa, Artificial Sequence
  Description of Artificial Sequence: Synthetic peptide
DILSNNHTR

SEQ ID NO: 13605 - protein, 8 aa, Artificial Sequence
  Description of Artificial Sequence: Synthetic peptide
MTLTVQAR

SEQ ID NO: 13606 - protein, 11 aa, Artificial Sequence
  Description of Artificial Sequence: Synthetic peptide
EAWKFSSEQTR

SEQ ID NO: 13607 - protein, 9 aa, Artificial Sequence
  Description of Artificial Sequence: Synthetic peptide
EIHQNPVPK

SEQ ID NO: 13608 - protein, 9 aa, Artificial Sequence
  Description of Artificial Sequence: Synthetic peptide
FYVDGAASR

SEQ ID NO: 13609 - protein, 9 aa, Artificial Sequence
  Description of Artificial Sequence: Synthetic peptide
NNEIKVVPR

SEQ ID NO: 13610 - protein, 10 aa, Artificial Sequence
  Description of Artificial Sequence: Synthetic peptide
EVTTHSFNCR

SEQ ID NO: 13611 - protein, 8 aa, Artificial Sequence
  Description of Artificial Sequence: Synthetic peptide
ENLAFQQR

SEQ ID NO: 13612 - protein, 9 aa, Artificial Sequence
  Description of Artificial Sequence: Synthetic peptide
DNYTDTIYR

SEQ ID NO: 13613 - protein, 10 aa, Artificial Sequence
  Description of Artificial Sequence: Synthetic peptide
ELKKIIGQVR

SEQ ID NO: 13614 - protein, 10 aa, Artificial Sequence
  Description of Artificial Sequence: Synthetic peptide
IYQEPHKNLK

SEQ ID NO: 13615 - protein, 9 aa, Artificial Sequence
  Description of Artificial Sequence: Synthetic peptide
FNLPPIVAK

SEQ ID NO: 13616 - protein, 11 aa, Artificial Sequence
  Description of Artificial Sequence: Synthetic peptide
ETLRPGGGDMR

SEQ ID NO: 13617 - protein, 9 aa, Artificial Sequence
  Description of Artificial Sequence: Synthetic peptide
SITGLILTR

SEQ ID NO: 13618 - protein, 10 aa, Artificial Sequence
  Description of Artificial Sequence: Synthetic peptide
ATNMTNAMNR

SEQ ID NO: 13619 - protein, 11 aa, Artificial Sequence
  Description of Artificial Sequence: Synthetic peptide
TSKGLGISYGR

SEQ ID NO: 13620 - protein, 11 aa, Artificial Sequence
  Description of Artificial Sequence: Synthetic peptide
ETFYVDGAANR

SEQ ID NO: 13621 - protein, 11 aa, Artificial Sequence
  Description of Artificial Sequence: Synthetic peptide
ETFYVDGAASR

SEQ ID NO: 13622 - protein, 9 aa, Artificial Sequence
  Description of Artificial Sequence: Synthetic peptide
TSTSILMQK

SEQ ID NO: 13623 - protein, 9 aa, Artificial Sequence
  Description of Artificial Sequence: Synthetic peptide
TATSVLMQK

SEQ ID NO: 13624 - protein, 9 aa, Artificial Sequence
  Description of Artificial Sequence: Synthetic peptide
TSTAIMMQK

SEQ ID NO: 13625 - protein, 9 aa, Artificial Sequence
  Description of Artificial Sequence: Synthetic peptide
SITGLILTR

SEQ ID NO: 13626 - protein, 10 aa, Artificial Sequence
  Description of Artificial Sequence: Synthetic peptide
ITTEINDIKK

SEQ ID NO: 13627 - protein, 11 aa, Artificial Sequence
  Description of Artificial Sequence: Synthetic peptide
TVNDIQKLVGK

SEQ ID NO: 13628 - protein, 11 aa, Artificial Sequence
  Description of Artificial Sequence: Synthetic peptide
QVTSTSILMQK

SEQ ID NO: 13629 - protein, 9 aa, Artificial Sequence
  Description of Artificial Sequence: Synthetic peptide
ESVKINCTR

SEQ ID NO: 13630 - protein, 10 aa, Artificial Sequence
  Description of Artificial Sequence: Synthetic peptide
SSITGLILTR

SEQ ID NO: 13631 - protein, 10 aa, Artificial Sequence
  Description of Artificial Sequence: Synthetic peptide
ATNMTNAMNR

SEQ ID NO: 13632 - protein, 11 aa, Artificial Sequence
  Description of Artificial Sequence: Synthetic peptide
DNSLPEAGAER

SEQ ID NO: 13633 - protein, 11 aa, Artificial Sequence
  Description of Artificial Sequence: Synthetic peptide
NATNMTNAMNR

SEQ ID NO: 13634 - protein, 9 aa, Artificial Sequence
  Description of Artificial Sequence: Synthetic peptide
EVHQDPVSK

SEQ ID NO: 13635 - protein, 11 aa, Artificial Sequence
  Description of Artificial Sequence: Synthetic peptide
QVTATSVLMQK

SEQ ID NO: 13636 - protein, 9 aa, Artificial Sequence
  Description of Artificial Sequence: Synthetic peptide
TGAAIMMQK

SEQ ID NO: 13637 - protein, 10 aa, Artificial Sequence
  Description of Artificial Sequence: Synthetic peptide
ATSTAIMMQK

SEQ ID NO: 13638 - protein, 11 aa, Artificial Sequence
  Description of Artificial Sequence: Synthetic peptide
DSSLPEAGAER

SEQ ID NO: 13639 - protein, 10 aa, Artificial Sequence
  Description of Artificial Sequence: Synthetic peptide
ATGEIIGDTR

SEQ ID NO: 13640 - protein, 9 aa, Artificial Sequence
  Description of Artificial Sequence: Synthetic peptide
EPVGVAPTK

SEQ ID NO: 13641 - protein, 9 aa, Artificial Sequence
  Description of Artificial Sequence: Synthetic peptide
TNMTNAMNR

SEQ ID NO: 13642 - protein, 10 aa, Artificial Sequence
  Description of Artificial Sequence: Synthetic peptide
EVNIVTDSQY

SEQ ID NO: 13643 - protein, 11 aa, Artificial Sequence
  Description of Artificial Sequence: Synthetic peptide
DTWEGVQAIIR

SEQ ID NO: 13644 - protein, 10 aa, Artificial Sequence
  Description of Artificial Sequence: Synthetic peptide
VTSTSILMQK

SEQ ID NO: 13645 - protein, 9 aa, Artificial Sequence
  Description of Artificial Sequence: Synthetic peptide
EIHQNPVPK

SEQ ID NO: 13646 - protein, 10 aa, Artificial Sequence
  Description of Artificial Sequence: Synthetic peptide
ASITLTVQAR

SEQ ID NO: 13647 - protein, 9 aa, Artificial Sequence
  Description of Artificial Sequence: Synthetic peptide
FAVLSVVNR

SEQ ID NO: 13648 - protein, 10 aa, Artificial Sequence
  Description of Artificial Sequence: Synthetic peptide
DCFSDSAIRK

SEQ ID NO: 13649 - protein, 10 aa, Artificial Sequence
  Description of Artificial Sequence: Synthetic peptide
VTATSVLMQK

SEQ ID NO: 13650 - protein, 10 aa, Artificial Sequence
  Description of Artificial Sequence: Synthetic peptide
DNNEIKVVPR

SEQ ID NO: 13651 - protein, 10 aa, Artificial Sequence
  Description of Artificial Sequence: Synthetic peptide
NVAFQQGEAR

SEQ ID NO: 13652 - protein, 10 aa, Artificial Sequence
  Description of Artificial Sequence: Synthetic peptide
ATGEIIGDIR

SEQ ID NO: 13653 - protein, 11 aa, Artificial Sequence
  Description of Artificial Sequence: Synthetic peptide
DVKQLTEVVQK

SEQ ID NO: 13654 - protein, 9 aa, Artificial Sequence
  Description of Artificial Sequence: Synthetic peptide
NITGLLLTR

SEQ ID NO: 13655 - protein, 10 aa, Artificial Sequence
  Description of Artificial Sequence: Synthetic peptide
NSLPEAGAER

SEQ ID NO: 13656 - protein, 9 aa, Artificial Sequence
  Description of Artificial Sequence: Synthetic peptide
MVHQAISPR

SEQ ID NO: 13657 - protein, 11 aa, Artificial Sequence
  Description of Artificial Sequence: Synthetic peptide
NSSITGLILTR

SEQ ID NO: 13658 - protein, 11 aa, Artificial Sequence
  Description of Artificial Sequence: Synthetic peptide
YATGEIIGDTR

SEQ ID NO: 13659 - protein, 10 aa, Artificial Sequence
  Description of Artificial Sequence: Synthetic peptide
DIIATDIQTK

SEQ ID NO: 13660 - protein, 11 aa, Artificial Sequence
  Description of Artificial Sequence: Synthetic peptide
TAIAVAEGTDR

SEQ ID NO: 13661 - protein, 10 aa, Artificial Sequence
  Description of Artificial Sequence: Synthetic peptide
ASMTLTVQAR

SEQ ID NO: 13662 - protein, 10 aa, Artificial Sequence
  Description of Artificial Sequence: Synthetic peptide
ATGAAIMMQK

SEQ ID NO: 13663 - protein, 11 aa, Artificial Sequence
  Description of Artificial Sequence: Synthetic peptide
VGPTPVNIIGR

SEQ ID NO: 13664 - protein, 10 aa, Artificial Sequence
  Description of Artificial Sequence: Synthetic peptide
EQAPPLVSLK

SEQ ID NO: 13665 - protein, 9 aa, Artificial Sequence
  Description of Artificial Sequence: Synthetic peptide
DNYTDTIYR

SEQ ID NO: 13666 - protein, 9 aa, Artificial Sequence
  Description of Artificial Sequence: Synthetic peptide
VAFQQGEAR

SEQ ID NO: 13667 - protein, 10 aa, Artificial Sequence
  Description of Artificial Sequence: Synthetic peptide
VTIKVEGQLR

SEQ ID NO: 13668 - protein, 9 aa, Artificial Sequence
  Description of Artificial Sequence: Synthetic peptide
ETAYFILKL

SEQ ID NO: 13669 - protein, 9 aa, Artificial Sequence
  Description of Artificial Sequence: Synthetic peptide
EAAYFILKL

SEQ ID NO: 13670 - protein, 9 aa, Artificial Sequence
  Description of Artificial Sequence: Synthetic peptide
ETAYFLLKL

SEQ ID NO: 13671 - protein, 9 aa, Artificial Sequence
  Description of Artificial Sequence: Synthetic peptide
NTVAVLYYV

SEQ ID NO: 13672 - protein, 9 aa, Artificial Sequence
  Description of Artificial Sequence: Synthetic peptide
QLTEVVQKV

SEQ ID NO: 13673 - protein, 9 aa, Artificial Sequence
  Description of Artificial Sequence: Synthetic peptide
TVLSIINRV

SEQ ID NO: 13674 - protein, 9 aa, Artificial Sequence
  Description of Artificial Sequence: Synthetic peptide
YAAPIAGQI

SEQ ID NO: 13675 - protein, 10 aa, Artificial Sequence
  Description of Artificial Sequence: Synthetic peptide
EIIKEPVHGV

SEQ ID NO: 13676 - protein, 9 aa, Artificial Sequence
  Description of Artificial Sequence: Synthetic peptide
FIPGNINNL

SEQ ID NO: 13677 - protein, 9 aa, Artificial Sequence
  Description of Artificial Sequence: Synthetic peptide
QLTEVVQKI

SEQ ID NO: 13678 - protein, 9 aa, Artificial Sequence
  Description of Artificial Sequence: Synthetic peptide
NTIVVLYYV

SEQ ID NO: 13679 - protein, 9 aa, Artificial Sequence
  Description of Artificial Sequence: Synthetic peptide
TVNDIQKLV

SEQ ID NO: 13680 - protein, 9 aa, Artificial Sequence
  Description of Artificial Sequence: Synthetic peptide
EVSQNYPIV

SEQ ID NO: 13681 - protein, 9 aa, Artificial Sequence
  Description of Artificial Sequence: Synthetic peptide
TTSNLQEQI

SEQ ID NO: 13682 - protein, 9 aa, Artificial Sequence
  Description of Artificial Sequence: Synthetic peptide
EVTTHSFNC

SEQ ID NO: 13683 - protein, 9 aa, Artificial Sequence
  Description of Artificial Sequence: Synthetic peptide
FTSAVVKAA

SEQ ID NO: 13684 - protein, 9 aa, Artificial Sequence
  Description of Artificial Sequence: Synthetic peptide
EIKSLYNTV

SEQ ID NO: 13685 - protein, 9 aa, Artificial Sequence
  Description of Artificial Sequence: Synthetic peptide
EQAPPLVSL

SEQ ID NO: 13686 - protein, 9 aa, Artificial Sequence
  Description of Artificial Sequence: Synthetic peptide
LTIAIVAYI

SEQ ID NO: 13687 - protein, 10 aa, Artificial Sequence
  Description of Artificial Sequence: Synthetic peptide
EIVNQIIEQL

SEQ ID NO: 13688 - protein, 9 aa, Artificial Sequence
  Description of Artificial Sequence: Synthetic peptide
IVNQIIEQL

SEQ ID NO: 13689 - protein, 9 aa, Artificial Sequence
  Description of Artificial Sequence: Synthetic peptide
YTAFTIPSI

SEQ ID NO: 13690 - protein, 9 aa, Artificial Sequence
  Description of Artificial Sequence: Synthetic peptide
DTITLPCRI

SEQ ID NO: 13691 - protein, 9 aa, Artificial Sequence
  Description of Artificial Sequence: Synthetic peptide
FTSTVVKAA

SEQ ID NO: 13692 - protein, 9 aa, Artificial Sequence
  Description of Artificial Sequence: Synthetic peptide
GAASITLTV

SEQ ID NO: 13693 - protein, 9 aa, Artificial Sequence
  Description of Artificial Sequence: Synthetic peptide
TTSTLQEQI

SEQ ID NO: 13694 - protein, 9 aa, Artificial Sequence
  Description of Artificial Sequence: Synthetic peptide
NTSTVTQAC

SEQ ID NO: 13695 - protein, 9 aa, Artificial Sequence
  Description of Artificial Sequence: Synthetic peptide
DIAGTTSNL

SEQ ID NO: 13696 - protein, 9 aa, Artificial Sequence
  Description of Artificial Sequence: Synthetic peptide
MTSNPPVPV

SEQ ID NO: 13697 - protein, 9 aa, Artificial Sequence
  Description of Artificial Sequence: Synthetic peptide
EVIPMFSAL

SEQ ID NO: 13698 - protein, 9 aa, Artificial Sequence
  Description of Artificial Sequence: Synthetic peptide
TTALFNTTL

SEQ ID NO: 13699 - protein, 11 aa, Artificial Sequence
  Description of Artificial Sequence: Synthetic peptide
EVIPAETGQEA

SEQ ID NO: 13700 - protein, 9 aa, Artificial Sequence
  Description of Artificial Sequence: Synthetic peptide
AVLSIINRV

SEQ ID NO: 13701 - protein, 9 aa, Artificial Sequence
  Description of Artificial Sequence: Synthetic peptide
QNYPIVQNI

SEQ ID NO: 13702 - protein, 9 aa, Artificial Sequence
  Description of Artificial Sequence: Synthetic peptide
SAISLFDTI

SEQ ID NO: 13703 - protein, 11 aa, Artificial Sequence
  Description of Artificial Sequence: Synthetic peptide
ETFYVDGAANR

SEQ ID NO: 13704 - protein, 9 aa, Artificial Sequence
  Description of Artificial Sequence: Synthetic peptide
MTGNPPVPV

SEQ ID NO: 13705 - protein, 10 aa, Artificial Sequence
  Description of Artificial Sequence: Synthetic peptide
EVANNTNENI

SEQ ID NO: 13706 - protein, 9 aa, Artificial Sequence
  Description of Artificial Sequence: Synthetic peptide
AAVDLSHFL

SEQ ID NO: 13707 - protein, 9 aa, Artificial Sequence
  Description of Artificial Sequence: Synthetic peptide
LVNQIIEQL

SEQ ID NO: 13708 - protein, 9 aa, Artificial Sequence
  Description of Artificial Sequence: Synthetic peptide
ESFGFGEEI

SEQ ID NO: 13709 - protein, 9 aa, Artificial Sequence
  Description of Artificial Sequence: Synthetic peptide
EVTTHSFSC

SEQ ID NO: 13710 - protein, 10 aa, Artificial Sequence
  Description of Artificial Sequence: Synthetic peptide
TVSSLDFPQI

SEQ ID NO: 13711 - protein, 11 aa, Artificial Sequence
  Description of Artificial Sequence: Synthetic peptide
EVVQKIATESI

SEQ ID NO: 13712 - protein, 9 aa, Artificial Sequence
  Description of Artificial Sequence: Synthetic peptide
QNYPIVQNL

SEQ ID NO: 13713 - protein, 9 aa, Artificial Sequence
  Description of Artificial Sequence: Synthetic peptide
EQVPPLISL

SEQ ID NO: 13714 - protein, 9 aa, Artificial Sequence
  Description of Artificial Sequence: Synthetic peptide
NSSNIYKLI

SEQ ID NO: 13715 - protein, 10 aa, Artificial Sequence
  Description of Artificial Sequence: Synthetic peptide
EVGPFIPGDI

SEQ ID NO: 13716 - protein, 9 aa, Artificial Sequence
  Description of Artificial Sequence: Synthetic peptide
SPAIFQSSM

SEQ ID NO: 13717 - protein, 9 aa, Artificial Sequence
  Description of Artificial Sequence: Synthetic peptide
SPASRELRV

SEQ ID NO: 13718 - protein, 9 aa, Artificial Sequence
  Description of Artificial Sequence: Synthetic peptide
ILRPIGGEM

SEQ ID NO: 13719 - protein, 9 aa, Artificial Sequence
  Description of Artificial Sequence: Synthetic peptide
RPMTYKAAL

SEQ ID NO: 13720 - protein, 10 aa, Artificial Sequence
  Description of Artificial Sequence: Synthetic peptide
RPNNNTRRSI

SEQ ID NO: 13721 - protein, 9 aa, Artificial Sequence
  Description of Artificial Sequence: Synthetic peptide
APIAGQIQC

SEQ ID NO: 13722 - protein, 10 aa, Artificial Sequence
  Description of Artificial Sequence: Synthetic peptide
RPNNNTRKSI

SEQ ID NO: 13723 - protein, 9 aa, Artificial Sequence
  Description of Artificial Sequence: Synthetic peptide
GPASRGLRV

SEQ ID NO: 13724 - protein, 9 aa, Artificial Sequence
  Description of Artificial Sequence: Synthetic peptide
QIRDTKEAL

SEQ ID NO: 13725 - protein, 10 aa, Artificial Sequence
  Description of Artificial Sequence: Synthetic peptide
APPLVSLKSL

SEQ ID NO: 13726 - protein, 8 aa, Artificial Sequence
  Description of Artificial Sequence: Synthetic peptide
KPVVSTQL

SEQ ID NO: 13727 - protein, 8 aa, Artificial Sequence
  Description of Artificial Sequence: Synthetic peptide
RPVVSTQL

SEQ ID NO: 13728 - protein, 10 aa, Artificial Sequence
  Description of Artificial Sequence: Synthetic peptide
KEMYPPLTSL

SEQ ID NO: 13729 - protein, 8 aa, Artificial Sequence
  Description of Artificial Sequence: Synthetic peptide
IPGNINNL

SEQ ID NO: 13730 - protein, 10 aa, Artificial Sequence
  Description of Artificial Sequence: Synthetic peptide
SPIETVPVKL

SEQ ID NO: 13731 - protein, 10 aa, Artificial Sequence
  Description of Artificial Sequence: Synthetic peptide
VPTDPSPQEL

SEQ ID NO: 13732 - protein, 9 aa, Artificial Sequence
  Description of Artificial Sequence: Synthetic peptide
RVRGGDSSL

SEQ ID NO: 13733 - protein, 10 aa, Artificial Sequence
  Description of Artificial Sequence: Synthetic peptide
RPTNITRRSM

SEQ ID NO: 13734 - protein, 8 aa, Artificial Sequence
  Description of Artificial Sequence: Synthetic peptide
AIRVGGQL

SEQ ID NO: 13735 - protein, 10 aa, Artificial Sequence
  Description of Artificial Sequence: Synthetic peptide
APNVTISEEM

SEQ ID NO: 13736 - protein, 10 aa, Artificial Sequence
  Description of Artificial Sequence: Synthetic peptide
VPTDPNPQEL

SEQ ID NO: 13737 - protein, 9 aa, Artificial Sequence
  Description of Artificial Sequence: Synthetic peptide
SPAIFQCSM

SEQ ID NO: 13738 - protein, 9 aa, Artificial Sequence
  Description of Artificial Sequence: Synthetic peptide
TPQDLNTML

SEQ ID NO: 13739 - protein, 9 aa, Artificial Sequence
  Description of Artificial Sequence: Synthetic peptide
ELKNSAISL

SEQ ID NO: 13740 - protein, 9 aa, Artificial Sequence
  Description of Artificial Sequence: Synthetic peptide
EMYPPLTSL

SEQ ID NO: 13741 - protein, 9 aa, Artificial Sequence
  Description of Artificial Sequence: Synthetic peptide
FIPGNINNL

SEQ ID NO: 13742 - protein, 8 aa, Artificial Sequence
  Description of Artificial Sequence: Synthetic peptide
DPVSKQPL

SEQ ID NO: 13743 - protein, 9 aa, Artificial Sequence
  Description of Artificial Sequence: Synthetic peptide
DSAIRKAIL

SEQ ID NO: 13744 - protein, 9 aa, Artificial Sequence
  Description of Artificial Sequence: Synthetic peptide
EAMSKATST

SEQ ID NO: 13745 - protein, 8 aa, Artificial Sequence
  Description of Artificial Sequence: Synthetic peptide
DPVPKQPL

SEQ ID NO: 13746 - protein, 8 aa, Artificial Sequence
  Description of Artificial Sequence: Synthetic peptide
IQKEKVYL

SEQ ID NO: 13747 - protein, 8 aa, Artificial Sequence
  Description of Artificial Sequence: Synthetic peptide
TTNQKTEL

SEQ ID NO: 13748 - protein, 8 aa, Artificial Sequence
  Description of Artificial Sequence: Synthetic peptide
DNYTKTIY

SEQ ID NO: 13749 - protein, 9 aa, Artificial Sequence
  Description of Artificial Sequence: Synthetic peptide
QLQARILAV

SEQ ID NO: 13750 - protein, 8 aa, Artificial Sequence
  Description of Artificial Sequence: Synthetic peptide
HLKTAVQM

SEQ ID NO: 13751 - protein, 8 aa, Artificial Sequence
  Description of Artificial Sequence: Synthetic peptide
GQMVHQSL

SEQ ID NO: 13752 - protein, 9 aa, Artificial Sequence
  Description of Artificial Sequence: Synthetic peptide
ELKISAISL

SEQ ID NO: 13753 - protein, 11 aa, Artificial Sequence
  Description of Artificial Sequence: Synthetic peptide
TQVDPGLADQL

SEQ ID NO: 13754 - protein, 11 aa, Artificial Sequence
  Description of Artificial Sequence: Synthetic peptide
TQVDPDLADQL

SEQ ID NO: 13755 - protein, 10 aa, Artificial Sequence
  Description of Artificial Sequence: Synthetic peptide
GQIRDQAEHL

SEQ ID NO: 13756 - protein, 9 aa, Artificial Sequence
  Description of Artificial Sequence: Synthetic peptide
QLTEVVQKI

SEQ ID NO: 13757 - protein, 10 aa, Artificial Sequence
  Description of Artificial Sequence: Synthetic peptide
HQDPVSKQPL

SEQ ID NO: 13758 - protein, 10 aa, Artificial Sequence
  Description of Artificial Sequence: Synthetic peptide
GQVRDQAEHL

SEQ ID NO: 13759 - protein, 9 aa, Artificial Sequence
  Description of Artificial Sequence: Synthetic peptide
RQGAERALL

SEQ ID NO: 13760 - protein, 10 aa, Artificial Sequence
  Description of Artificial Sequence: Synthetic peptide
IQIRDTKEAL

SEQ ID NO: 13761 - protein, 10 aa, Artificial Sequence
  Description of Artificial Sequence: Synthetic peptide
HQDPVPKQPL

SEQ ID NO: 13762 - protein, 9 aa, Artificial Sequence
  Description of Artificial Sequence: Synthetic peptide
FLDNVTENF

SEQ ID NO: 13763 - protein, 9 aa, Artificial Sequence
  Description of Artificial Sequence: Synthetic peptide
VQFNESVKI

SEQ ID NO: 13764 - protein, 9 aa, Artificial Sequence
  Description of Artificial Sequence: Synthetic peptide
EQAPPLVSL

SEQ ID NO: 13765 - protein, 9 aa, Artificial Sequence
  Description of Artificial Sequence: Synthetic peptide
AQEDEEVGF

SEQ ID NO: 13766 - protein, 9 aa, Artificial Sequence
  Description of Artificial Sequence: Synthetic peptide
YQSNPYPKL

SEQ ID NO: 13767 - protein, 9 aa, Artificial Sequence
  Description of Artificial Sequence: Synthetic peptide
IQLPDKSSW

SEQ ID NO: 13768 - protein, 9 aa, Artificial Sequence
  Description of Artificial Sequence: Synthetic peptide
QLTEVVQKI

SEQ ID NO: 13769 - protein, 9 aa, Artificial Sequence
  Description of Artificial Sequence: Synthetic peptide
QLTEVVQKV

SEQ ID NO: 13770 - protein, 9 aa, Artificial Sequence
  Description of Artificial Sequence: Synthetic peptide
VQFNESVKI

SEQ ID NO: 13771 - protein, 9 aa, Artificial Sequence
  Description of Artificial Sequence: Synthetic peptide
GAASITLTV

SEQ ID NO: 13772 - protein, 9 aa, Artificial Sequence
  Description of Artificial Sequence: Synthetic peptide
VQFKNPVKI

SEQ ID NO: 13773 - protein, 8 aa, Artificial Sequence
  Description of Artificial Sequence: Synthetic peptide
GQMVHQAI

SEQ ID NO: 13774 - protein, 9 aa, Artificial Sequence
  Description of Artificial Sequence: Synthetic peptide
QQHLLQLTV

SEQ ID NO: 13775 - protein, 9 aa, Artificial Sequence
  Description of Artificial Sequence: Synthetic peptide
GQVDCSPGI

SEQ ID NO: 13776 - protein, 9 aa, Artificial Sequence
  Description of Artificial Sequence: Synthetic peptide
GAASMTLTV

SEQ ID NO: 13777 - protein, 8 aa, Artificial Sequence
  Description of Artificial Sequence: Synthetic peptide
SQVTATSV

SEQ ID NO: 13778 - protein, 8 aa, Artificial Sequence
  Description of Artificial Sequence: Synthetic peptide
VQIQPLGI

SEQ ID NO: 13779 - protein, 9 aa, Artificial Sequence
  Description of Artificial Sequence: Synthetic peptide
VQKIATESI

SEQ ID NO: 13780 - protein, 9 aa, Artificial Sequence
  Description of Artificial Sequence: Synthetic peptide
AVLSVVNRV

SEQ ID NO: 13781 - protein, 9 aa, Artificial Sequence
  Description of Artificial Sequence: Synthetic peptide
ALGEVGLFI

SEQ ID NO: 13782 - protein, 8 aa, Artificial Sequence
  Description of Artificial Sequence: Synthetic peptide
SQVTSTSI

SEQ ID NO: 13783 - protein, 9 aa, Artificial Sequence
  Description of Artificial Sequence: Synthetic peptide
AVLAVINRV

SEQ ID NO: 13784 - protein, 9 aa, Artificial Sequence
  Description of Artificial Sequence: Synthetic peptide
SQIYPGIRV

SEQ ID NO: 13785 - protein, 9 aa, Artificial Sequence
  Description of Artificial Sequence: Synthetic peptide
ALGEVGPLI

SEQ ID NO: 13786 - protein, 9 aa, Artificial Sequence
  Description of Artificial Sequence: Synthetic peptide
SQIYPGIRI

SEQ ID NO: 13787 - protein, 9 aa, Artificial Sequence
  Description of Artificial Sequence: Synthetic peptide
YQLETEPII

SEQ ID NO: 13788 - protein, 9 aa, Artificial Sequence
  Description of Artificial Sequence: Synthetic peptide
ALGEVGPFI

SEQ ID NO: 13789 - protein, 8 aa, Artificial Sequence
  Description of Artificial Sequence: Synthetic peptide
VQITPLCV

SEQ ID NO: 13790 - protein, 9 aa, Artificial Sequence
  Description of Artificial Sequence: Synthetic peptide
VQKVATEGI

SEQ ID NO: 13791 - protein, 10 aa, Artificial Sequence
  Description of Artificial Sequence: Synthetic peptide
RQYDQIPIEI

SEQ ID NO: 13792 - protein, 9 aa, Artificial Sequence
  Description of Artificial Sequence: Synthetic peptide
GQAMYAPPI

SEQ ID NO: 13793 - protein, 10 aa, Artificial Sequence
  Description of Artificial Sequence: Synthetic peptide
ALTDVVPLTV

SEQ ID NO: 13794 - protein, 8 aa, Artificial Sequence
  Description of Artificial Sequence: Synthetic peptide
GQMVHQSL

SEQ ID NO: 13795 - protein, 10 aa, Artificial Sequence
  Description of Artificial Sequence: Synthetic peptide
RQYDQVPIEI

SEQ ID NO: 13796 - protein, 9 aa, Artificial Sequence
  Description of Artificial Sequence: Synthetic peptide
AVLSIINRV

SEQ ID NO: 13797 - protein, 8 aa, Artificial Sequence
  Description of Artificial Sequence: Synthetic peptide
GQMVHQAL

SEQ ID NO: 13798 - protein, 9 aa, Artificial Sequence
  Description of Artificial Sequence: Synthetic peptide
VQNIQGQMV

SEQ ID NO: 13799 - protein, 9 aa, Artificial Sequence
  Description of Artificial Sequence: Synthetic peptide
ILAEAMSQV

SEQ ID NO: 13800 - protein, 9 aa, Artificial Sequence
  Description of Artificial Sequence: Synthetic peptide
VQKIATEGI

SEQ ID NO: 13801 - protein, 9 aa, Artificial Sequence
  Description of Artificial Sequence: Synthetic peptide
AIVAYIVAI

SEQ ID NO: 13802 - protein, 9 aa, Artificial Sequence
  Description of Artificial Sequence: Synthetic peptide
GQIQCNSSI

SEQ ID NO: 13803 - protein, 9 aa, Artificial Sequence
  Description of Artificial Sequence: Synthetic peptide
YAAPIAGQI

SEQ ID NO: 13804 - protein, 9 aa, Artificial Sequence
  Description of Artificial Sequence: Synthetic peptide
GQKAIGTVL

SEQ ID NO: 13805 - protein, 9 aa, Artificial Sequence
  Description of Artificial Sequence: Synthetic peptide
VVQIQPLGI

SEQ ID NO: 13806 - protein, 9 aa, Artificial Sequence
  Description of Artificial Sequence: Synthetic peptide
VQFNRSVAI

SEQ ID NO: 13807 - protein, 8 aa, Artificial Sequence
  Description of Artificial Sequence: Synthetic peptide
NQIIEQLI

SEQ ID NO: 13808 - protein, 9 aa, Artificial Sequence
  Description of Artificial Sequence: Synthetic peptide
VVKIEPLGV

SEQ ID NO: 13809 - protein, 8 aa, Artificial Sequence
  Description of Artificial Sequence: Synthetic peptide
GQEAAYFI

SEQ ID NO: 13810 - protein, 9 aa, Artificial Sequence
  Description of Artificial Sequence: Synthetic peptide
QNYPIVQNI

SEQ ID NO: 13811 - protein, 9 aa, Artificial Sequence
  Description of Artificial Sequence: Synthetic peptide
GQLQPSLQT

SEQ ID NO: 13812 - protein, 9 aa, Artificial Sequence
  Description of Artificial Sequence: Synthetic peptide
TLTQACPKV

SEQ ID NO: 13813 - protein, 9 aa, Artificial Sequence
  Description of Artificial Sequence: Synthetic peptide
GQLQSSLQT

SEQ ID NO: 13814 - protein, 10 aa, Artificial Sequence
  Description of Artificial Sequence: Synthetic peptide
KQLTEVVQKI

SEQ ID NO: 13815 - protein, 9 aa, Artificial Sequence
  Description of Artificial Sequence: Synthetic peptide
TVLSIINRV

SEQ ID NO: 13816 - protein, 9 aa, Artificial Sequence
  Description of Artificial Sequence: Synthetic peptide
YQSNPYPKL

SEQ ID NO: 13817 - protein, 8 aa, Artificial Sequence
  Description of Artificial Sequence: Synthetic peptide
GQETAYFI

SEQ ID NO: 13818 - protein, 10 aa, Artificial Sequence
  Description of Artificial Sequence: Synthetic peptide
RQYDQVSIEI

SEQ ID NO: 13819 - protein, 9 aa, Artificial Sequence
  Description of Artificial Sequence: Synthetic peptide
GLYPPLTSL

SEQ ID NO: 13820 - protein, 10 aa, Artificial Sequence
  Description of Artificial Sequence: Synthetic peptide
KVVQIQPLGI

SEQ ID NO: 13821 - protein, 9 aa, Artificial Sequence
  Description of Artificial Sequence: Synthetic peptide
NQKTELQAI

SEQ ID NO: 13822 - protein, 9 aa, Artificial Sequence
  Description of Artificial Sequence: Synthetic peptide
ERFALNPSL

SEQ ID NO: 13823 - protein, 9 aa, Artificial Sequence
  Description of Artificial Sequence: Synthetic peptide
ERYLKDQQL

SEQ ID NO: 13824 - protein, 8 aa, Artificial Sequence
  Description of Artificial Sequence: Synthetic peptide
ERILSTCL

SEQ ID NO: 13825 - protein, 9 aa, Artificial Sequence
  Description of Artificial Sequence: Synthetic peptide
ERQGTVSSL

SEQ ID NO: 13826 - protein, 9 aa, Artificial Sequence
  Description of Artificial Sequence: Synthetic peptide
ERFALNPGL

SEQ ID NO: 13827 - protein, 9 aa, Artificial Sequence
  Description of Artificial Sequence: Synthetic peptide
NRSVAINCT

SEQ ID NO: 13828 - protein, 8 aa, Artificial Sequence
  Description of Artificial Sequence: Synthetic peptide
GQMVHQAL

SEQ ID NO: 13829 - protein, 8 aa, Artificial Sequence
  Description of Artificial Sequence: Synthetic peptide
GQMVHQSL

SEQ ID NO: 13830 - protein, 9 aa, Artificial Sequence
  Description of Artificial Sequence: Synthetic peptide
ERYLKDQQL

SEQ ID NO: 13831 - protein, 9 aa, Artificial Sequence
  Description of Artificial Sequence: Synthetic peptide
VQFNRSVAI

SEQ ID NO: 13832 - protein, 8 aa, Artificial Sequence
  Description of Artificial Sequence: Synthetic peptide
LQAIHLAL

SEQ ID NO: 13833 - protein, 8 aa, Artificial Sequence
  Description of Artificial Sequence: Synthetic peptide
GQMVHQAI

SEQ ID NO: 13834 - protein, 9 aa, Artificial Sequence
  Description of Artificial Sequence: Synthetic peptide
DQYNKTVGF

SEQ ID NO: 13835 - protein, 8 aa, Artificial Sequence
  Description of Artificial Sequence: Synthetic peptide
YQEPHRNL

SEQ ID NO: 13836 - protein, 9 aa, Artificial Sequence
  Description of Artificial Sequence: Synthetic peptide
ERFALNPSL

SEQ ID NO: 13837 - protein, 8 aa, Artificial Sequence
  Description of Artificial Sequence: Synthetic peptide
IQKLVGKL

SEQ ID NO: 13838 - protein, 10 aa, Artificial Sequence
  Description of Artificial Sequence: Synthetic peptide
VQINNSNTSY

SEQ ID NO: 13839 - protein, 9 aa, Artificial Sequence
  Description of Artificial Sequence: Synthetic peptide
QINNSNTSY

SEQ ID NO: 13840 - protein, 9 aa, Artificial Sequence
  Description of Artificial Sequence: Synthetic peptide
GQKAIGTVL

SEQ ID NO: 13841 - protein, 9 aa, Artificial Sequence
  Description of Artificial Sequence: Synthetic peptide
TSKGLGISY

SEQ ID NO: 13842 - protein, 9 aa, Artificial Sequence
  Description of Artificial Sequence: Synthetic peptide
VSKGVSQNY

SEQ ID NO: 13843 - protein, 8 aa, Artificial Sequence
  Description of Artificial Sequence: Synthetic peptide
GQMVHQSL

SEQ ID NO: 13844 - protein, 9 aa, Artificial Sequence
  Description of Artificial Sequence: Synthetic peptide
TLIKIATEF

SEQ ID NO: 13845 - protein, 9 aa, Artificial Sequence
  Description of Artificial Sequence: Synthetic peptide
TLKNVSGEF

SEQ ID NO: 13846 - protein, 8 aa, Artificial Sequence
  Description of Artificial Sequence: Synthetic peptide
GQMVHQAL

SEQ ID NO: 13847 - protein, 9 aa, Artificial Sequence
  Description of Artificial Sequence: Synthetic peptide
KQISKIQNF

SEQ ID NO: 13848 - protein, 8 aa, Artificial Sequence
  Description of Artificial Sequence: Synthetic peptide
GQYIYNTY

SEQ ID NO: 13849 - protein, 9 aa, Artificial Sequence
  Description of Artificial Sequence: Synthetic peptide
SQVTATSVL

SEQ ID NO: 13850 - protein, 8 aa, Artificial Sequence
  Description of Artificial Sequence: Synthetic peptide
GQHIYNTY

SEQ ID NO: 13851 - protein, 11 aa, Artificial Sequence
  Description of Artificial Sequence: Synthetic peptide
VVQINNSNTSY

SEQ ID NO: 13852 - protein, 9 aa, Artificial Sequence
  Description of Artificial Sequence: Synthetic peptide
AIMMQKSNF

SEQ ID NO: 13853 - protein, 9 aa, Artificial Sequence
  Description of Artificial Sequence: Synthetic peptide
TQACPKVSF

SEQ ID NO: 13854 - protein, 9 aa, Artificial Sequence
  Description of Artificial Sequence: Synthetic peptide
KQITKIQNF

SEQ ID NO: 13855 - protein, 9 aa, Artificial Sequence
  Description of Artificial Sequence: Synthetic peptide
VQKIATESI

SEQ ID NO: 13856 - protein, 9 aa, Artificial Sequence
  Description of Artificial Sequence: Synthetic peptide
TQIGCTLNF

SEQ ID NO: 13857 - protein, 11 aa, Artificial Sequence
  Description of Artificial Sequence: Synthetic peptide
VVPINNSTSEY

SEQ ID NO: 13858 - protein, 9 aa, Artificial Sequence
  Description of Artificial Sequence: Synthetic peptide
PINNSTSEY

SEQ ID NO: 13859 - protein, 9 aa, Artificial Sequence
  Description of Artificial Sequence: Synthetic peptide
SLIVVIAAY

SEQ ID NO: 13860 - protein, 10 aa, Artificial Sequence
  Description of Artificial Sequence: Synthetic peptide
GVSKGVSQNY

SEQ ID NO: 13861 - protein, 9 aa, Artificial Sequence
  Description of Artificial Sequence: Synthetic peptide
IQQEFGVPY

SEQ ID NO: 13862 - protein, 9 aa, Artificial Sequence
  Description of Artificial Sequence: Synthetic peptide
GLYPPLTSL

SEQ ID NO: 13863 - protein, 9 aa, Artificial Sequence
  Description of Artificial Sequence: Synthetic peptide
TVLDVGDAY

SEQ ID NO: 13864 - protein, 10 aa, Artificial Sequence
  Description of Artificial Sequence: Synthetic peptide
GIRIGPGQTF

SEQ ID NO: 13865 - protein, 10 aa, Artificial Sequence
  Description of Artificial Sequence: Synthetic peptide
ILKEPVHGVY

SEQ ID NO: 13866 - protein, 9 aa, Artificial Sequence
  Description of Artificial Sequence: Synthetic peptide
DQYNKTVGF

SEQ ID NO: 13867 - protein, 9 aa, Artificial Sequence
  Description of Artificial Sequence: Synthetic peptide
ILRPIGGEM

SEQ ID NO: 13868 - protein, 9 aa, Artificial Sequence
  Description of Artificial Sequence: Synthetic peptide
VQKVATEGI

SEQ ID NO: 13869 - protein, 9 aa, Artificial Sequence
  Description of Artificial Sequence: Synthetic peptide
EQAPPLVSL

SEQ ID NO: 13870 - protein, 11 aa, Artificial Sequence
  Description of Artificial Sequence: Synthetic peptide
IVPIEKNTTSY

SEQ ID NO: 13871 - protein, 9 aa, Artificial Sequence
  Description of Artificial Sequence: Synthetic peptide
KLQEEQDKY

SEQ ID NO: 13872 - protein, 9 aa, Artificial Sequence
  Description of Artificial Sequence: Synthetic peptide
VLGNVSEKF

SEQ ID NO: 13873 - protein, 10 aa, Artificial Sequence
  Description of Artificial Sequence: Synthetic peptide
IIKEPVHGVY

SEQ ID NO: 13874 - protein, 9 aa, Artificial Sequence
  Description of Artificial Sequence: Synthetic peptide
IRIGPGQTF

SEQ ID NO: 13875 - protein, 9 aa, Artificial Sequence
  Description of Artificial Sequence: Synthetic peptide
DSKLVIVTY

SEQ ID NO: 13876 - protein, 9 aa, Artificial Sequence
  Description of Artificial Sequence: Synthetic peptide
IQQEFGIPY

SEQ ID NO: 13877 - protein, 8 aa, Artificial Sequence
  Description of Artificial Sequence: Synthetic peptide
AVHVASGY

SEQ ID NO: 13878 - protein, 9 aa, Artificial Sequence
  Description of Artificial Sequence: Synthetic peptide
ISNYTGTIY

SEQ ID NO: 13879 - protein, 8 aa, Artificial Sequence
  Description of Artificial Sequence: Synthetic peptide
IEKNTTSY

SEQ ID NO: 13880 - protein, 10 aa, Artificial Sequence
  Description of Artificial Sequence: Synthetic peptide
VPIEKNTTSY

SEQ ID NO: 13881 - protein, 9 aa, Artificial Sequence
  Description of Artificial Sequence: Synthetic peptide
FLGAAGSTM

SEQ ID NO: 13882 - protein, 8 aa, Artificial Sequence
  Description of Artificial Sequence: Synthetic peptide
GQMVHQAI

SEQ ID NO: 13883 - protein, 9 aa, Artificial Sequence
  Description of Artificial Sequence: Synthetic peptide
IQLPNKSSW

SEQ ID NO: 13884 - protein, 9 aa, Artificial Sequence
  Description of Artificial Sequence: Synthetic peptide
DSKLVIVSY

SEQ ID NO: 13885 - protein, 9 aa, Artificial Sequence
  Description of Artificial Sequence: Synthetic peptide
SQVTSTSIL

SEQ ID NO: 13886 - protein, 11 aa, Artificial Sequence
  Description of Artificial Sequence: Synthetic peptide
AAADKGVSQNY

SEQ ID NO: 13887 - protein, 8 aa, Artificial Sequence
  Description of Artificial Sequence: Synthetic peptide
LIKIATEF

SEQ ID NO: 13888 - protein, 9 aa, Artificial Sequence
  Description of Artificial Sequence: Synthetic peptide
VQKIATEGI

SEQ ID NO: 13889 - protein, 9 aa, Artificial Sequence
  Description of Artificial Sequence: Synthetic peptide
VLGNVTENF

SEQ ID NO: 13890 - protein, 10 aa, Artificial Sequence
  Description of Artificial Sequence: Synthetic peptide
MQWEKEISNY

SEQ ID NO: 13891 - protein, 9 aa, Artificial Sequence
  Description of Artificial Sequence: Synthetic peptide
RIGPGQVFY

SEQ ID NO: 13892 - protein, 10 aa, Artificial Sequence
  Description of Artificial Sequence: Synthetic peptide
VPINNSTSEY

SEQ ID NO: 13893 - protein, 8 aa, Artificial Sequence
  Description of Artificial Sequence: Synthetic peptide
WQRVGQAM

SEQ ID NO: 13894 - protein, 9 aa, Artificial Sequence
  Description of Artificial Sequence: Synthetic peptide
IQLPDKSSW

SEQ ID NO: 13895 - protein, 8 aa, Artificial Sequence
  Description of Artificial Sequence: Synthetic peptide
AQYWGQEL

SEQ ID NO: 13896 - protein, 9 aa, Artificial Sequence
  Description of Artificial Sequence: Synthetic peptide
QINNSNTSY

SEQ ID NO: 13897 - protein, 9 aa, Artificial Sequence
  Description of Artificial Sequence: Synthetic peptide
DQYNKTVGF

SEQ ID NO: 13898 - protein, 9 aa, Artificial Sequence
  Description of Artificial Sequence: Synthetic peptide
TLIKIATEF

SEQ ID NO: 13899 - protein, 10 aa, Artificial Sequence
  Description of Artificial Sequence: Synthetic peptide
VPIEKNTTSY

SEQ ID NO: 13900 - protein, 9 aa, Artificial Sequence
  Description of Artificial Sequence: Synthetic peptide
TVLDVGDAY

SEQ ID NO: 13901 - protein, 9 aa, Artificial Sequence
  Description of Artificial Sequence: Synthetic peptide
EMYPPLTSL

SEQ ID NO: 13902 - protein, 9 aa, Artificial Sequence
  Description of Artificial Sequence: Synthetic peptide
FLGAAGSTM

SEQ ID NO: 13903 - protein, 9 aa, Artificial Sequence
  Description of Artificial Sequence: Synthetic peptide
TLKNVSGEF

SEQ ID NO: 13904 - protein, 9 aa, Artificial Sequence
  Description of Artificial Sequence: Synthetic peptide
EQAPPLVSL

SEQ ID NO: 13905 - protein, 10 aa, Artificial Sequence
  Description of Artificial Sequence: Synthetic peptide
VQINNSNTSY

SEQ ID NO: 13906 - protein, 9 aa, Artificial Sequence
  Description of Artificial Sequence: Synthetic peptide
DSKLVIVTY

SEQ ID NO: 13907 - protein, 9 aa, Artificial Sequence
  Description of Artificial Sequence: Synthetic peptide
EVHNVWATY

SEQ ID NO: 13908 - protein, 9 aa, Artificial Sequence
  Description of Artificial Sequence: Synthetic peptide
DSKLVIVSY

SEQ ID NO: 13909 - protein, 9 aa, Artificial Sequence
  Description of Artificial Sequence: Synthetic peptide
TQACPKVSF

SEQ ID NO: 13910 - protein, 9 aa, Artificial Sequence
  Description of Artificial Sequence: Synthetic peptide
TSKGLGISY

SEQ ID NO: 13911 - protein, 10 aa, Artificial Sequence
  Description of Artificial Sequence: Synthetic peptide
VPINNSTSEY

SEQ ID NO: 13912 - protein, 9 aa, Artificial Sequence
  Description of Artificial Sequence: Synthetic peptide
TLRPGGGDM

SEQ ID NO: 13913 - protein, 9 aa, Artificial Sequence
  Description of Artificial Sequence: Synthetic peptide
SAISLFDTI

SEQ ID NO: 13914 - protein, 9 aa, Artificial Sequence
  Description of Artificial Sequence: Synthetic peptide
TVGGHQAAM

SEQ ID NO: 13915 - protein, 9 aa, Artificial Sequence
  Description of Artificial Sequence: Synthetic peptide
EIHNVWATY

SEQ ID NO: 13916 - protein, 10 aa, Artificial Sequence
  Description of Artificial Sequence: Synthetic peptide
EISERILTTY

SEQ ID NO: 13917 - protein, 9 aa, Artificial Sequence
  Description of Artificial Sequence: Synthetic peptide
EQVPPLISL

SEQ ID NO: 13918 - protein, 9 aa, Artificial Sequence
  Description of Artificial Sequence: Synthetic peptide
SLIVVIAAY

SEQ ID NO: 13919 - protein, 10 aa, Artificial Sequence
  Description of Artificial Sequence: Synthetic peptide
EPIKNSSNIY

SEQ ID NO: 13920 - protein, 9 aa, Artificial Sequence
  Description of Artificial Sequence: Synthetic peptide
ILRPIGGEM

SEQ ID NO: 13921 - protein, 8 aa, Artificial Sequence
  Description of Artificial Sequence: Synthetic peptide
DNYTKTIY

SEQ ID NO: 13922 - protein, 9 aa, Artificial Sequence
  Description of Artificial Sequence: Synthetic peptide
DSKLVIITY

SEQ ID NO: 13923 - protein, 9 aa, Artificial Sequence
  Description of Artificial Sequence: Synthetic peptide
AAVDLSHFL

SEQ ID NO: 13924 - protein, 8 aa, Artificial Sequence
  Description of Artificial Sequence: Synthetic peptide
DQLIHLHY

SEQ ID NO: 13925 - protein, 10 aa, Artificial Sequence
  Description of Artificial Sequence: Synthetic peptide
EISNYTGTIY

SEQ ID NO: 13926 - protein, 8 aa, Artificial Sequence
  Description of Artificial Sequence: Synthetic peptide
GQYIYNTY

SEQ ID NO: 13927 - protein, 9 aa, Artificial Sequence
  Description of Artificial Sequence: Synthetic peptide
SQVTATSVL

SEQ ID NO: 13928 - protein, 8 aa, Artificial Sequence
  Description of Artificial Sequence: Synthetic peptide
DQLIHLRY

SEQ ID NO: 13929 - protein, 9 aa, Artificial Sequence
  Description of Artificial Sequence: Synthetic peptide
YAAPIAGQI

SEQ ID NO: 13930 - protein, 9 aa, Artificial Sequence
  Description of Artificial Sequence: Synthetic peptide
DVEITTHSF

SEQ ID NO: 13931 - protein, 8 aa, Artificial Sequence
  Description of Artificial Sequence: Synthetic peptide
DQLIHLYY

SEQ ID NO: 13932 - protein, 9 aa, Artificial Sequence
  Description of Artificial Sequence: Synthetic peptide
SAEPVPLQL

SEQ ID NO: 13933 - protein, 9 aa, Artificial Sequence
  Description of Artificial Sequence: Synthetic peptide
DIAGTTSTL

SEQ ID NO: 13934 - protein, 9 aa, Artificial Sequence
  Description of Artificial Sequence: Synthetic peptide
LLTIAIVAY

SEQ ID NO: 13935 - protein, 10 aa, Artificial Sequence
  Description of Artificial Sequence: Synthetic peptide
EVNIVTDSQY

SEQ ID NO: 13936 - protein, 9 aa, Artificial Sequence
  Description of Artificial Sequence: Synthetic peptide
GLYPPLTSL

SEQ ID NO: 13937 - protein, 9 aa, Artificial Sequence
  Description of Artificial Sequence: Synthetic peptide
IRIGPGQTF

SEQ ID NO: 13938 - protein, 10 aa, Artificial Sequence
  Description of Artificial Sequence: Synthetic peptide
VQINNSNTSY

SEQ ID NO: 13939 - protein, 8 aa, Artificial Sequence
  Description of Artificial Sequence: Synthetic peptide
SKLVIVTY

SEQ ID NO: 13940 - protein, 8 aa, Artificial Sequence
  Description of Artificial Sequence: Synthetic peptide
SKLVIVSY

SEQ ID NO: 13941 - protein, 9 aa, Artificial Sequence
  Description of Artificial Sequence: Synthetic peptide
AKNPEIVIY

SEQ ID NO: 13942 - protein, 8 aa, Artificial Sequence
  Description of Artificial Sequence: Synthetic peptide
SKGLGISY

SEQ ID NO: 13943 - protein, 8 aa, Artificial Sequence
  Description of Artificial Sequence: Synthetic peptide
AKTIIVQF

SEQ ID NO: 13944 - protein, 9 aa, Artificial Sequence
  Description of Artificial Sequence: Synthetic peptide
GQKAIGTVL

SEQ ID NO: 13945 - protein, 9 aa, Artificial Sequence
  Description of Artificial Sequence: Synthetic peptide
VKNPEIVIY

SEQ ID NO: 13946 - protein, 8 aa, Artificial Sequence
  Description of Artificial Sequence: Synthetic peptide
GQYIYNTY

SEQ ID NO: 13947 - protein, 8 aa, Artificial Sequence
  Description of Artificial Sequence: Synthetic peptide
SKLVIITY

SEQ ID NO: 13948 - protein, 8 aa, Artificial Sequence
  Description of Artificial Sequence: Synthetic peptide
GQMVHQSL

SEQ ID NO: 13949 - protein, 9 aa, Artificial Sequence
  Description of Artificial Sequence: Synthetic peptide
MKKGLGISY

SEQ ID NO: 13950 - protein, 9 aa, Artificial Sequence
  Description of Artificial Sequence: Synthetic peptide
SKIGPENPY

SEQ ID NO: 13951 - protein, 9 aa, Artificial Sequence
  Description of Artificial Sequence: Synthetic peptide
TSKGLGISY

SEQ ID NO: 13952 - protein, 9 aa, Artificial Sequence
  Description of Artificial Sequence: Synthetic peptide
IRIGPGQTF

SEQ ID NO: 13953 - protein, 8 aa, Artificial Sequence
  Description of Artificial Sequence: Synthetic peptide
TKTIIVQF

SEQ ID NO: 13954 - protein, 8 aa, Artificial Sequence
  Description of Artificial Sequence: Synthetic peptide
KKGLGISY

SEQ ID NO: 13955 - protein, 8 aa, Artificial Sequence
  Description of Artificial Sequence: Synthetic peptide
GQMVHQAL

SEQ ID NO: 13956 - protein, 8 aa, Artificial Sequence
  Description of Artificial Sequence: Synthetic peptide
GQHIYNTY

SEQ ID NO: 13957 - protein, 9 aa, Artificial Sequence
  Description of Artificial Sequence: Synthetic peptide
VSKGVSQNY

SEQ ID NO: 13958 - protein, 8 aa, Artificial Sequence
  Description of Artificial Sequence: Synthetic peptide
TKNIIVQF

SEQ ID NO: 13959 - protein, 9 aa, Artificial Sequence
  Description of Artificial Sequence: Synthetic peptide
IRIGPGQVF

SEQ ID NO: 13960 - protein, 9 aa, Artificial Sequence
  Description of Artificial Sequence: Synthetic peptide
QINNSNTSY

SEQ ID NO: 13961 - protein, 9 aa, Artificial Sequence
  Description of Artificial Sequence: Synthetic peptide
SKATSTAIM

SEQ ID NO: 13962 - protein, 9 aa, Artificial Sequence
  Description of Artificial Sequence: Synthetic peptide
ARNPEIVVY

SEQ ID NO: 13963 - protein, 9 aa, Artificial Sequence
  Description of Artificial Sequence: Synthetic peptide
SQVTATSVL

SEQ ID NO: 13964 - protein, 8 aa, Artificial Sequence
  Description of Artificial Sequence: Synthetic peptide
LKNVSGEF

SEQ ID NO: 13965 - protein, 9 aa, Artificial Sequence
  Description of Artificial Sequence: Synthetic peptide
VKVIEEKAF

SEQ ID NO: 13966 - protein, 9 aa, Artificial Sequence
  Description of Artificial Sequence: Synthetic peptide
KQISKIQNF

SEQ ID NO: 13967 - protein, 9 aa, Artificial Sequence
  Description of Artificial Sequence: Synthetic peptide
KQITKIQNF

SEQ ID NO: 13968 - protein, 9 aa, Artificial Sequence
  Description of Artificial Sequence: Synthetic peptide
TQACPKVSF

SEQ ID NO: 13969 - protein, 9 aa, Artificial Sequence
  Description of Artificial Sequence: Synthetic peptide
IHEISERIL

SEQ ID NO: 13970 - protein, 9 aa, Artificial Sequence
  Description of Artificial Sequence: Synthetic peptide
EQAPPLVSL

SEQ ID NO: 13971 - protein, 9 aa, Artificial Sequence
  Description of Artificial Sequence: Synthetic peptide
HQAISPRTL

SEQ ID NO: 13972 - protein, 9 aa, Artificial Sequence
  Description of Artificial Sequence: Synthetic peptide
EHLKTAVQM

SEQ ID NO: 13973 - protein, 9 aa, Artificial Sequence
  Description of Artificial Sequence: Synthetic peptide
IHQISERIL

SEQ ID NO: 13974 - protein, 9 aa, Artificial Sequence
  Description of Artificial Sequence: Synthetic peptide
IHIGPGRAF

SEQ ID NO: 13975 - protein, 9 aa, Artificial Sequence
  Description of Artificial Sequence: Synthetic peptide
EQVPPLISL

SEQ ID NO: 13976 - protein, 9 aa, Artificial Sequence
  Description of Artificial Sequence: Synthetic peptide
THLEGKIIL

SEQ ID NO: 13977 - protein, 9 aa, Artificial Sequence
  Description of Artificial Sequence: Synthetic peptide
SQVTATSVL

SEQ ID NO: 13978 - protein, 11 aa, Artificial Sequence
  Description of Artificial Sequence: Synthetic peptide
DHQDPVSKQPL

SEQ ID NO: 13979 - protein, 9 aa, Artificial Sequence
  Description of Artificial Sequence: Synthetic peptide
HQALSPRTL

SEQ ID NO: 13980 - protein, 11 aa, Artificial Sequence
  Description of Artificial Sequence: Synthetic peptide
VHQDPVSKQPL

SEQ ID NO: 13981 - protein, 10 aa, Artificial Sequence
  Description of Artificial Sequence: Synthetic peptide
HQDPVSKQPL

SEQ ID NO: 13982 - protein, 9 aa, Artificial Sequence
  Description of Artificial Sequence: Synthetic peptide
GHQAAMQML

SEQ ID NO: 13983 - protein, 9 aa, Artificial Sequence
  Description of Artificial Sequence: Synthetic peptide
SHLNKSITF

SEQ ID NO: 13984 - protein, 9 aa, Artificial Sequence
  Description of Artificial Sequence: Synthetic peptide
HQSLSPRTL

SEQ ID NO: 13985 - protein, 9 aa, Artificial Sequence
  Description of Artificial Sequence: Synthetic peptide
YQLETEPIL

SEQ ID NO: 13986 - protein, 10 aa, Artificial Sequence
  Description of Artificial Sequence: Synthetic peptide
HQDPVPKQPL

SEQ ID NO: 13987 - protein, 9 aa, Artificial Sequence
  Description of Artificial Sequence: Synthetic peptide
AHTNDVKQL

SEQ ID NO: 13988 - protein, 9 aa, Artificial Sequence
  Description of Artificial Sequence: Synthetic peptide
GQKAIGTVL

SEQ ID NO: 13989 - protein, 9 aa, Artificial Sequence
  Description of Artificial Sequence: Synthetic peptide
YQSNPYPKL

SEQ ID NO: 13990 - protein, 11 aa, Artificial Sequence
  Description of Artificial Sequence: Synthetic peptide
IHQDPVPKQPL

SEQ ID NO: 13991 - protein, 9 aa, Artificial Sequence
  Description of Artificial Sequence: Synthetic peptide
SHAALGSGI

SEQ ID NO: 13992 - protein, 9 aa, Artificial Sequence
  Description of Artificial Sequence: Synthetic peptide
SQVTSTSIL

SEQ ID NO: 13993 - protein, 10 aa, Artificial Sequence
  Description of Artificial Sequence: Synthetic peptide
HQNPVPKQPL

SEQ ID NO: 13994 - protein, 9 aa, Artificial Sequence
  Description of Artificial Sequence: Synthetic peptide
NHTRVNDIL

SEQ ID NO: 13995 - protein, 9 aa, Artificial Sequence
  Description of Artificial Sequence: Synthetic peptide
EMYPPLTSL

SEQ ID NO: 13996 - protein, 9 aa, Artificial Sequence
  Description of Artificial Sequence: Synthetic peptide
TLIKIATEF

SEQ ID NO: 13997 - protein, 9 aa, Artificial Sequence
  Description of Artificial Sequence: Synthetic peptide
IQLPDKSSW

SEQ ID NO: 13998 - protein, 9 aa, Artificial Sequence
  Description of Artificial Sequence: Synthetic peptide
TVLDVGDAY

SEQ ID NO: 13999 - protein, 9 aa, Artificial Sequence
  Description of Artificial Sequence: Synthetic peptide
IQLPNKSSW

SEQ ID NO: 14000 - protein, 9 aa, Artificial Sequence
  Description of Artificial Sequence: Synthetic peptide
QINNSNTSY

SEQ ID NO: 14001 - protein, 9 aa, Artificial Sequence
  Description of Artificial Sequence: Synthetic peptide
IQLPEKSSW

SEQ ID NO: 14002 - protein, 9 aa, Artificial Sequence
  Description of Artificial Sequence: Synthetic peptide
TLKNVSGEF

SEQ ID NO: 14003 - protein, 9 aa, Artificial Sequence
  Description of Artificial Sequence: Synthetic peptide
TINEEAAEW

SEQ ID NO: 14004 - protein, 9 aa, Artificial Sequence
  Description of Artificial Sequence: Synthetic peptide
SAISLFDTI

SEQ ID NO: 14005 - protein, 9 aa, Artificial Sequence
  Description of Artificial Sequence: Synthetic peptide
EMYPPLTSL

SEQ ID NO: 14006 - protein, 8 aa, Artificial Sequence
  Description of Artificial Sequence: Synthetic peptide
SERILTTY

SEQ ID NO: 14007 - protein, 8 aa, Artificial Sequence
  Description of Artificial Sequence: Synthetic peptide
DEALLTAV

SEQ ID NO: 14008 - protein, 8 aa, Artificial Sequence
  Description of Artificial Sequence: Synthetic peptide
VEITTHSF

SEQ ID NO: 14009 - protein, 11 aa, Artificial Sequence
  Description of Artificial Sequence: Synthetic peptide
SEVNIVTDSQY

SEQ ID NO: 14010 - protein, 8 aa, Artificial Sequence
  Description of Artificial Sequence: Synthetic peptide
LEITTHSF

SEQ ID NO: 14011 - protein, 8 aa, Artificial Sequence
  Description of Artificial Sequence: Synthetic peptide
LEVTTHSF

SEQ ID NO: 14012 - protein, 8 aa, Artificial Sequence
  Description of Artificial Sequence: Synthetic peptide
NETPGIRY

SEQ ID NO: 14013 - protein, 10 aa, Artificial Sequence
  Description of Artificial Sequence: Synthetic peptide
DEELLKAVRY

SEQ ID NO: 14014 - protein, 8 aa, Artificial Sequence
  Description of Artificial Sequence: Synthetic peptide
PEIVVYQY

SEQ ID NO: 14015 - protein, 8 aa, Artificial Sequence
  Description of Artificial Sequence: Synthetic peptide
TELQAIQL

SEQ ID NO: 14016 - protein, 8 aa, Artificial Sequence
  Description of Artificial Sequence: Synthetic peptide
SEEIKSLY

SEQ ID NO: 14017 - protein, 8 aa, Artificial Sequence
  Description of Artificial Sequence: Synthetic peptide
PEIVIYQY

SEQ ID NO: 14018 - protein, 8 aa, Artificial Sequence
  Description of Artificial Sequence: Synthetic peptide
IEKNTTSY

SEQ ID NO: 14019 - protein, 8 aa, Artificial Sequence
  Description of Artificial Sequence: Synthetic peptide
SEELKSLY

SEQ ID NO: 14020 - protein, 11 aa, Artificial Sequence
  Description of Artificial Sequence: Synthetic peptide
HEISERILTTY

SEQ ID NO: 14021 - protein, 8 aa, Artificial Sequence
  Description of Artificial Sequence: Synthetic peptide
TELQAIHL

SEQ ID NO: 14022 - protein, 8 aa, Artificial Sequence
  Description of Artificial Sequence: Synthetic peptide
DEELLKAV

SEQ ID NO: 14023 - protein, 8 aa, Artificial Sequence
  Description of Artificial Sequence: Synthetic peptide
DDLWVTVY

SEQ ID NO: 14024 - protein, 8 aa, Artificial Sequence
  Description of Artificial Sequence: Synthetic peptide
VEAIIRTL

SEQ ID NO: 14025 - protein, 9 aa, Artificial Sequence
  Description of Artificial Sequence: Synthetic peptide
IRIGPGQTF

SEQ ID NO: 14026 - protein, 9 aa, Artificial Sequence
  Description of Artificial Sequence: Synthetic peptide
ARILAVERY

SEQ ID NO: 14027 - protein, 11 aa, Artificial Sequence
  Description of Artificial Sequence: Synthetic peptide
GIVQQQSNLLK

SEQ ID NO: 14028 - protein, 10 aa, Artificial Sequence
  Description of Artificial Sequence: Synthetic peptide
GGLDGLIYSR

SEQ ID NO: 14029 - protein, 11 aa, Artificial Sequence
  Description of Artificial Sequence: Synthetic peptide
KGGLEGLIYSK

SEQ ID NO: 14030 - protein, 11 aa, Artificial Sequence
  Description of Artificial Sequence: Synthetic peptide
YATGEIIGDTR

SEQ ID NO: 14031 - protein, 9 aa, Artificial Sequence
  Description of Artificial Sequence: Synthetic peptide
ARNPEIVVY

SEQ ID NO: 14032 - protein, 9 aa, Artificial Sequence
  Description of Artificial Sequence: Synthetic peptide
IRIGPGQVF

SEQ ID NO: 14033 - protein, 10 aa, Artificial Sequence
  Description of Artificial Sequence: Synthetic peptide
ATGEIIGDTR

SEQ ID NO: 14034 - protein, 10 aa, Artificial Sequence
  Description of Artificial Sequence: Synthetic peptide
GAVDLSHFLK

SEQ ID NO: 14035 - protein, 10 aa, Artificial Sequence
  Description of Artificial Sequence: Synthetic peptide
SEIHQNPVPK

SEQ ID NO: 14036 - protein, 10 aa, Artificial Sequence
  Description of Artificial Sequence: Synthetic peptide
IRIGPGQVFY

SEQ ID NO: 14037 - protein, 10 aa, Artificial Sequence
  Description of Artificial Sequence: Synthetic peptide
TRATNADLAW

SEQ ID NO: 14038 - protein, 11 aa, Artificial Sequence
  Description of Artificial Sequence: Synthetic peptide
IRSENISDNTK

SEQ ID NO: 14039 - protein, 11 aa, Artificial Sequence
  Description of Artificial Sequence: Synthetic peptide
FALNPGLLETK

SEQ ID NO: 14040 - protein, 11 aa, Artificial Sequence
  Description of Artificial Sequence: Synthetic peptide
YLALTALITPK

SEQ ID NO: 14041 - protein, 10 aa, Artificial Sequence
  Description of Artificial Sequence: Synthetic peptide
GGLEGLIYSK

SEQ ID NO: 14042 - protein, 10 aa, Artificial Sequence
  Description of Artificial Sequence: Synthetic peptide
GGLEGLIYSR

SEQ ID NO: 14043 - protein, 11 aa, Artificial Sequence
  Description of Artificial Sequence: Synthetic peptide
TAIAVAEGTDR

SEQ ID NO: 14044 - protein, 10 aa, Artificial Sequence
  Description of Artificial Sequence: Synthetic peptide
IRIGPGQTFF

SEQ ID NO: 14045 - protein, 9 aa, Artificial Sequence
  Description of Artificial Sequence: Synthetic peptide
ALTALVTPK

SEQ ID NO: 14046 - protein, 11 aa, Artificial Sequence
  Description of Artificial Sequence: Synthetic peptide
YATGEIIGDIR

SEQ ID NO: 14047 - protein, 8 aa, Artificial Sequence
  Description of Artificial Sequence: Synthetic peptide
QRVGQAMY

SEQ ID NO: 14048 - protein, 9 aa, Artificial Sequence
  Description of Artificial Sequence: Synthetic peptide
DRIIEVLQR

SEQ ID NO: 14049 - protein, 9 aa, Artificial Sequence
  Description of Artificial Sequence: Synthetic peptide
SRIGIIRQR

SEQ ID NO: 14050 - protein, 9 aa, Artificial Sequence
  Description of Artificial Sequence: Synthetic peptide
ARNPEIVVY

SEQ ID NO: 14051 - protein, 9 aa, Artificial Sequence
  Description of Artificial Sequence: Synthetic peptide
QRIKIGDTK

SEQ ID NO: 14052 - protein, 9 aa, Artificial Sequence
  Description of Artificial Sequence: Synthetic peptide
IRIGPGQTF

SEQ ID NO: 14053 - protein, 9 aa, Artificial Sequence
  Description of Artificial Sequence: Synthetic peptide
GRLQEPVRL

SEQ ID NO: 14054 - protein, 9 aa, Artificial Sequence
  Description of Artificial Sequence: Synthetic peptide
ARILAVERY

SEQ ID NO: 14055 - protein, 9 aa, Artificial Sequence
  Description of Artificial Sequence: Synthetic peptide
GRAVLNIPR

SEQ ID NO: 14056 - protein, 9 aa, Artificial Sequence
  Description of Artificial Sequence: Synthetic peptide
YRTQVDPGL

SEQ ID NO: 14057 - protein, 9 aa, Artificial Sequence
  Description of Artificial Sequence: Synthetic peptide
CRIKQIVNM

SEQ ID NO: 14058 - protein, 10 aa, Artificial Sequence
  Description of Artificial Sequence: Synthetic peptide
IRIGPGQVFY

SEQ ID NO: 14059 - protein, 9 aa, Artificial Sequence
  Description of Artificial Sequence: Synthetic peptide
MRAAEGVGK

SEQ ID NO: 14060 - protein, 9 aa, Artificial Sequence
  Description of Artificial Sequence: Synthetic peptide
GRAVLHIPR

SEQ ID NO: 14061 - protein, 9 aa, Artificial Sequence
  Description of Artificial Sequence: Synthetic peptide
IRIGPGQVF

SEQ ID NO: 14062 - protein, 9 aa, Artificial Sequence
  Description of Artificial Sequence: Synthetic peptide
TRKGLGISY

SEQ ID NO: 14063 - protein, 9 aa, Artificial Sequence
  Description of Artificial Sequence: Synthetic peptide
QRIDVRDTK

SEQ ID NO: 14064 - protein, 10 aa, Artificial Sequence
  Description of Artificial Sequence: Synthetic peptide
VPIEKNTTSY

SEQ ID NO: 14065 - protein, 9 aa, Artificial Sequence
  Description of Artificial Sequence: Synthetic peptide
EPIAGAETF

SEQ ID NO: 14066 - protein, 11 aa, Artificial Sequence
  Description of Artificial Sequence: Synthetic peptide
IPAETGQETAY

SEQ ID NO: 14067 - protein, 10 aa, Artificial Sequence
  Description of Artificial Sequence: Synthetic peptide
VPINNSTSEY

SEQ ID NO: 14068 - protein, 9 aa, Artificial Sequence
  Description of Artificial Sequence: Synthetic peptide
NPEIVVYQY

SEQ ID NO: 14069 - protein, 9 aa, Artificial Sequence
  Description of Artificial Sequence: Synthetic peptide
EPIIGAETF

SEQ ID NO: 14070 - protein, 9 aa, Artificial Sequence
  Description of Artificial Sequence: Synthetic peptide
NPEIVIYQY

SEQ ID NO: 14071 - protein, 11 aa, Artificial Sequence
  Description of Artificial Sequence: Synthetic peptide
IPAETGQEAAY

SEQ ID NO: 14072 - protein, 9 aa, Artificial Sequence
  Description of Artificial Sequence: Synthetic peptide
NCTDVNITM

SEQ ID NO: 14073 - protein, 9 aa, Artificial Sequence
  Description of Artificial Sequence: Synthetic peptide
EPILGAETF

SEQ ID NO: 14074 - protein, 9 aa, Artificial Sequence
  Description of Artificial Sequence: Synthetic peptide
NATNMTNAM

SEQ ID NO: 14075 - protein, 9 aa, Artificial Sequence
  Description of Artificial Sequence: Synthetic peptide
TVLDVGDAY

SEQ ID NO: 14076 - protein, 8 aa, Artificial Sequence
  Description of Artificial Sequence: Synthetic peptide
TPGPGIRY

SEQ ID NO: 14077 - protein, 10 aa, Artificial Sequence
  Description of Artificial Sequence: Synthetic peptide
EPIKNSSNIY

SEQ ID NO: 14078 - protein, 9 aa, Artificial Sequence
  Description of Artificial Sequence: Synthetic peptide
PPVPVGEIY

SEQ ID NO: 14079 - protein, 9 aa, Artificial Sequence
  Description of Artificial Sequence: Synthetic peptide
NAKTIIVQF

SEQ ID NO: 14080 - protein, 10 aa, Artificial Sequence
  Description of Artificial Sequence: Synthetic peptide
NPPVPVGEIY

SEQ ID NO: 14081 - protein, 8 aa, Artificial Sequence
  Description of Artificial Sequence: Synthetic peptide
TPGPGTRY

SEQ ID NO: 14082 - protein, 8 aa, Artificial Sequence
  Description of Artificial Sequence: Synthetic peptide
IPGNINNL

SEQ ID NO: 14083 - protein, 9 aa, Artificial Sequence
  Description of Artificial Sequence: Synthetic peptide
DSKLVIVTY

SEQ ID NO: 14084 - protein, 9 aa, Artificial Sequence
  Description of Artificial Sequence: Synthetic peptide
SPAIFQSSM

SEQ ID NO: 14085 - protein, 9 aa, Artificial Sequence
  Description of Artificial Sequence: Synthetic peptide
IATEFKDQY

SEQ ID NO: 14086 - protein, 9 aa, Artificial Sequence
  Description of Artificial Sequence: Synthetic peptide
FPISSIETV

SEQ ID NO: 14087 - protein, 9 aa, Artificial Sequence
  Description of Artificial Sequence: Synthetic peptide
DSKLVIVSY

SEQ ID NO: 14088 - protein, 8 aa, Artificial Sequence
  Description of Artificial Sequence: Synthetic peptide
NAVVVLYY

SEQ ID NO: 14089 - protein, 9 aa, Artificial Sequence
  Description of Artificial Sequence: Synthetic peptide
EVHNVWATY

SEQ ID NO: 14090 - protein, 10 aa, Artificial Sequence
  Description of Artificial Sequence: Synthetic peptide
EPIAGAETFY

SEQ ID NO: 14091 - protein, 9 aa, Artificial Sequence
  Description of Artificial Sequence: Synthetic peptide
LAFQQGEAW

SEQ ID NO: 14092 - protein, 9 aa, Artificial Sequence
  Description of Artificial Sequence: Synthetic peptide
TSKGLGISY

SEQ ID NO: 14093 - protein, 9 aa, Artificial Sequence
  Description of Artificial Sequence: Synthetic peptide
SAEPVPLQL

SEQ ID NO: 14094 - protein, 9 aa, Artificial Sequence
  Description of Artificial Sequence: Synthetic peptide
VPLTVEAEL

SEQ ID NO: 14095 - protein, 9 aa, Artificial Sequence
  Description of Artificial Sequence: Synthetic peptide
FPISPIETV

SEQ ID NO: 14096 - protein, 9 aa, Artificial Sequence
  Description of Artificial Sequence: Synthetic peptide
HPDKSESEL

SEQ ID NO: 14097 - protein, 9 aa, Artificial Sequence
  Description of Artificial Sequence: Synthetic peptide
IPLEEDSKL

SEQ ID NO: 14098 - protein, 9 aa, Artificial Sequence
  Description of Artificial Sequence: Synthetic peptide
IPLEDDSKL

SEQ ID NO: 14099 - protein, 9 aa, Artificial Sequence
  Description of Artificial Sequence: Synthetic peptide
IPLENDSKL

SEQ ID NO: 14100 - protein, 9 aa, Artificial Sequence
  Description of Artificial Sequence: Synthetic peptide
QPDKSESEL

SEQ ID NO: 14101 - protein, 9 aa, Artificial Sequence
  Description of Artificial Sequence: Synthetic peptide
DPDPQEIFL

SEQ ID NO: 14102 - protein, 9 aa, Artificial Sequence
  Description of Artificial Sequence: Synthetic peptide
DPNPQELVL

SEQ ID NO: 14103 - protein, 9 aa, Artificial Sequence
  Description of Artificial Sequence: Synthetic peptide
SAEPVPLQL

SEQ ID NO: 14104 - protein, 9 aa, Artificial Sequence
  Description of Artificial Sequence: Synthetic peptide
DPSPQELVL

SEQ ID NO: 14105 - protein, 9 aa, Artificial Sequence
  Description of Artificial Sequence: Synthetic peptide
VPLTAEAEL

SEQ ID NO: 14106 - protein, 9 aa, Artificial Sequence
  Description of Artificial Sequence: Synthetic peptide
VPLTVEAEL

SEQ ID NO: 14107 - protein, 8 aa, Artificial Sequence
  Description of Artificial Sequence: Synthetic peptide
IPGNINNL

SEQ ID NO: 14108 - protein, 9 aa, Artificial Sequence
  Description of Artificial Sequence: Synthetic peptide
EPIAGAETF

SEQ ID NO: 14109 - protein, 9 aa, Artificial Sequence
  Description of Artificial Sequence: Synthetic peptide
IPLKDDSKL

SEQ ID NO: 14110 - protein, 9 aa, Artificial Sequence
  Description of Artificial Sequence: Synthetic peptide
HPDKSESEI

SEQ ID NO: 14111 - protein, 9 aa, Artificial Sequence
  Description of Artificial Sequence: Synthetic peptide
FPISSIETV

SEQ ID NO: 14112 - protein, 9 aa, Artificial Sequence
  Description of Artificial Sequence: Synthetic peptide
FPISPIETV

SEQ ID NO: 14113 - protein, 9 aa, Artificial Sequence
  Description of Artificial Sequence: Synthetic peptide
IPLEDDSKL

SEQ ID NO: 14114 - protein, 9 aa, Artificial Sequence
  Description of Artificial Sequence: Synthetic peptide
IPLEEDSKL

SEQ ID NO: 14115 - protein, 9 aa, Artificial Sequence
  Description of Artificial Sequence: Synthetic peptide
IPLENDSKL

SEQ ID NO: 14116 - protein, 9 aa, Artificial Sequence
  Description of Artificial Sequence: Synthetic peptide
HPDKSESEL

SEQ ID NO: 14117 - protein, 9 aa, Artificial Sequence
  Description of Artificial Sequence: Synthetic peptide
FPISSIETV

SEQ ID NO: 14118 - protein, 9 aa, Artificial Sequence
  Description of Artificial Sequence: Synthetic peptide
DPNPQELVL

SEQ ID NO: 14119 - protein, 9 aa, Artificial Sequence
  Description of Artificial Sequence: Synthetic peptide
VPLTAEAEL

SEQ ID NO: 14120 - protein, 9 aa, Artificial Sequence
  Description of Artificial Sequence: Synthetic peptide
VPLTVEAEL

SEQ ID NO: 14121 - protein, 9 aa, Artificial Sequence
  Description of Artificial Sequence: Synthetic peptide
NATNMTNAM

SEQ ID NO: 14122 - protein, 9 aa, Artificial Sequence
  Description of Artificial Sequence: Synthetic peptide
FPISPIETV

SEQ ID NO: 14123 - protein, 9 aa, Artificial Sequence
  Description of Artificial Sequence: Synthetic peptide
EPIAGAETF

SEQ ID NO: 14124 - protein, 9 aa, Artificial Sequence
  Description of Artificial Sequence: Synthetic peptide
NCTDVNITM

SEQ ID NO: 14125 - protein, 8 aa, Artificial Sequence
  Description of Artificial Sequence: Synthetic peptide
IPGNINNL

SEQ ID NO: 14126 - protein, 9 aa, Artificial Sequence
  Description of Artificial Sequence: Synthetic peptide
SAEPVPLQL

SEQ ID NO: 14127 - protein, 9 aa, Artificial Sequence
  Description of Artificial Sequence: Synthetic peptide
DPSPQELVL

SEQ ID NO: 14128 - protein, 9 aa, Artificial Sequence
  Description of Artificial Sequence: Synthetic peptide
TPQDLNTML

SEQ ID NO: 14129 - protein, 9 aa, Artificial Sequence
  Description of Artificial Sequence: Synthetic peptide
IVTDSQYAL

SEQ ID NO: 14130 - protein, 10 aa, Artificial Sequence
  Description of Artificial Sequence: Synthetic peptide
SPIETVPVKL

SEQ ID NO: 14131 - protein, 9 aa, Artificial Sequence
  Description of Artificial Sequence: Synthetic peptide
IPLKDDSKL

SEQ ID NO: 14132 - protein, 10 aa, Artificial Sequence
  Description of Artificial Sequence: Synthetic peptide
VPTDPSPQEL

SEQ ID NO: 14133 - protein, 9 aa, Artificial Sequence
  Description of Artificial Sequence: Synthetic peptide
MVVGGLIGL

SEQ ID NO: 14134 - protein, 9 aa, Artificial Sequence
  Description of Artificial Sequence: Synthetic peptide
YAAPIAGQI

SEQ ID NO: 14135 - protein, 9 aa, Artificial Sequence
  Description of Artificial Sequence: Synthetic peptide
EPILGAETF

SEQ ID NO: 14136 - protein, 10 aa, Artificial Sequence
  Description of Artificial Sequence: Synthetic peptide
VPTDPNPQEL

SEQ ID NO: 14137 - protein, 10 aa, Artificial Sequence
  Description of Artificial Sequence: Synthetic peptide
NANPDCKTIL

SEQ ID NO: 14138 - protein, 8 aa, Artificial Sequence
  Description of Artificial Sequence: Synthetic peptide
IPGDINNL

SEQ ID NO: 14139 - protein, 11 aa, Artificial Sequence
  Description of Artificial Sequence: Synthetic peptide
HGMEDDDKEVL

SEQ ID NO: 14140 - protein, 10 aa, Artificial Sequence
  Description of Artificial Sequence: Synthetic peptide
HQDPVSKQPL

SEQ ID NO: 14141 - protein, 9 aa, Artificial Sequence
  Description of Artificial Sequence: Synthetic peptide
EPIIGAETF

SEQ ID NO: 14142 - protein, 9 aa, Artificial Sequence
  Description of Artificial Sequence: Synthetic peptide
DPDPQEIFL

SEQ ID NO: 14143 - protein, 11 aa, Artificial Sequence
  Description of Artificial Sequence: Synthetic peptide
VPLTAEAELEL

SEQ ID NO: 14144 - protein, 10 aa, Artificial Sequence
  Description of Artificial Sequence: Synthetic peptide
NANPDCKIIL

SEQ ID NO: 14145 - protein, 9 aa, Artificial Sequence
  Description of Artificial Sequence: Synthetic peptide
QPDKSESEL

SEQ ID NO: 14146 - protein, 9 aa, Artificial Sequence
  Description of Artificial Sequence: Synthetic peptide
YQLETEPIL

SEQ ID NO: 14147 - protein, 9 aa, Artificial Sequence
  Description of Artificial Sequence: Synthetic peptide
LPDKSSWTV

SEQ ID NO: 14148 - protein, 9 aa, Artificial Sequence
  Description of Artificial Sequence: Synthetic peptide
EQAPPLVSL

SEQ ID NO: 14149 - protein, 11 aa, Artificial Sequence
  Description of Artificial Sequence: Synthetic peptide
IPAETGQETAY

SEQ ID NO: 14150 - protein, 11 aa, Artificial Sequence
  Description of Artificial Sequence: Synthetic peptide
IPAETGQEAAY

SEQ ID NO: 14151 - protein, 9 aa, Artificial Sequence
  Description of Artificial Sequence: Synthetic peptide
HPDKSESEL

SEQ ID NO: 14152 - protein, 9 aa, Artificial Sequence
  Description of Artificial Sequence: Synthetic peptide
EPIAGAETF

SEQ ID NO: 14153 - protein, 10 aa, Artificial Sequence
  Description of Artificial Sequence: Synthetic peptide
VPIEKNTTSY

SEQ ID NO: 14154 - protein, 9 aa, Artificial Sequence
  Description of Artificial Sequence: Synthetic peptide
IPLEDDSKL

SEQ ID NO: 14155 - protein, 9 aa, Artificial Sequence
  Description of Artificial Sequence: Synthetic peptide
NPEIVVYQY

SEQ ID NO: 14156 - protein, 9 aa, Artificial Sequence
  Description of Artificial Sequence: Synthetic peptide
IPLEEDSKL

SEQ ID NO: 14157 - protein, 9 aa, Artificial Sequence
  Description of Artificial Sequence: Synthetic peptide
EPILGAETF

SEQ ID NO: 14158 - protein, 10 aa, Artificial Sequence
  Description of Artificial Sequence: Synthetic peptide
VPINNSTSEY

SEQ ID NO: 14159 - protein, 9 aa, Artificial Sequence
  Description of Artificial Sequence: Synthetic peptide
EPIIGAETF

SEQ ID NO: 14160 - protein, 9 aa, Artificial Sequence
  Description of Artificial Sequence: Synthetic peptide
NPEIVIYQY

SEQ ID NO: 14161 - protein, 10 aa, Artificial Sequence
  Description of Artificial Sequence: Synthetic peptide
EPIKNSSNIY

SEQ ID NO: 14162 - protein, 9 aa, Artificial Sequence
  Description of Artificial Sequence: Synthetic peptide
EAQEEEVGF

SEQ ID NO: 14163 - protein, 9 aa, Artificial Sequence
  Description of Artificial Sequence: Synthetic peptide
TVLDVGDAY

SEQ ID NO: 14164 - protein, 10 aa, Artificial Sequence
  Description of Artificial Sequence: Synthetic peptide
NPPVPVGEIY

SEQ ID NO: 14165 - protein, 9 aa, Artificial Sequence
  Description of Artificial Sequence: Synthetic peptide
IPLENDSKL

SEQ ID NO: 14166 - protein, 8 aa, Artificial Sequence
  Description of Artificial Sequence: Synthetic peptide
TPGPGIRY

SEQ ID NO: 14167 - protein, 9 aa, Artificial Sequence
  Description of Artificial Sequence: Synthetic peptide
HPDKSESEL

SEQ ID NO: 14168 - protein, 9 aa, Artificial Sequence
  Description of Artificial Sequence: Synthetic peptide
IPLEEDSKL

SEQ ID NO: 14169 - protein, 9 aa, Artificial Sequence
  Description of Artificial Sequence: Synthetic peptide
IPLEDDSKL

SEQ ID NO: 14170 - protein, 9 aa, Artificial Sequence
  Description of Artificial Sequence: Synthetic peptide
IPLENDSKL

SEQ ID NO: 14171 - protein, 9 aa, Artificial Sequence
  Description of Artificial Sequence: Synthetic peptide
DPNPQELVL

SEQ ID NO: 14172 - protein, 9 aa, Artificial Sequence
  Description of Artificial Sequence: Synthetic peptide
QPDKSESEL

SEQ ID NO: 14173 - protein, 9 aa, Artificial Sequence
  Description of Artificial Sequence: Synthetic peptide
DPDPQEIFL

SEQ ID NO: 14174 - protein, 9 aa, Artificial Sequence
  Description of Artificial Sequence: Synthetic peptide
VPLTAEAEL

SEQ ID NO: 14175 - protein, 9 aa, Artificial Sequence
  Description of Artificial Sequence: Synthetic peptide
VPLTVEAEL

SEQ ID NO: 14176 - protein, 9 aa, Artificial Sequence
  Description of Artificial Sequence: Synthetic peptide
DPSPQELVL

SEQ ID NO: 14177 - protein, 9 aa, Artificial Sequence
  Description of Artificial Sequence: Synthetic peptide
IPLKDDSKL

SEQ ID NO: 14178 - protein, 9 aa, Artificial Sequence
  Description of Artificial Sequence: Synthetic peptide
SAEPVPLQL

SEQ ID NO: 14179 - protein, 9 aa, Artificial Sequence
  Description of Artificial Sequence: Synthetic peptide
EPIAGAETF

SEQ ID NO: 14180 - protein, 9 aa, Artificial Sequence
  Description of Artificial Sequence: Synthetic peptide
FPISSIETV

SEQ ID NO: 14181 - protein, 8 aa, Artificial Sequence
  Description of Artificial Sequence: Synthetic peptide
DPDLADQL

SEQ ID NO: 14182 - protein, 8 aa, Artificial Sequence
  Description of Artificial Sequence: Synthetic peptide
IPGNINNL

SEQ ID NO: 14183 - protein, 9 aa, Artificial Sequence
  Description of Artificial Sequence: Synthetic peptide
FPISPIETV

SEQ ID NO: 14184 - protein, 9 aa, Artificial Sequence
  Description of Artificial Sequence: Synthetic peptide
HPDKSESEI

SEQ ID NO: 14185 - protein, 9 aa, Artificial Sequence
  Description of Artificial Sequence: Synthetic peptide
EPILGAETF

SEQ ID NO: 14186 - protein, 8 aa, Artificial Sequence
  Description of Artificial Sequence: Synthetic peptide
VEITTHSF

SEQ ID NO: 14187 - protein, 8 aa, Artificial Sequence
  Description of Artificial Sequence: Synthetic peptide
SEELKSLF

SEQ ID NO: 14188 - protein, 8 aa, Artificial Sequence
  Description of Artificial Sequence: Synthetic peptide
LDNVTENF

SEQ ID NO: 14189 - protein, 10 aa, Artificial Sequence
  Description of Artificial Sequence: Synthetic peptide
KEQVPPLISL

SEQ ID NO: 14190 - protein, 8 aa, Artificial Sequence
  Description of Artificial Sequence: Synthetic peptide
AEHLKTAV

SEQ ID NO: 14191 - protein, 8 aa, Artificial Sequence
  Description of Artificial Sequence: Synthetic peptide
ADQLIHKY

SEQ ID NO: 14192 - protein, 9 aa, Artificial Sequence
  Description of Artificial Sequence: Synthetic peptide
QDPVPKQPL

SEQ ID NO: 14193 - protein, 8 aa, Artificial Sequence
  Description of Artificial Sequence: Synthetic peptide
KEATTTLF

SEQ ID NO: 14194 - protein, 8 aa, Artificial Sequence
  Description of Artificial Sequence: Synthetic peptide
KEFNGTGL

SEQ ID NO: 14195 - protein, 10 aa, Artificial Sequence
  Description of Artificial Sequence: Synthetic peptide
KEMYPPLTSL

SEQ ID NO: 14196 - protein, 8 aa, Artificial Sequence
  Description of Artificial Sequence: Synthetic peptide
ADNLWVTV

SEQ ID NO: 14197 - protein, 9 aa, Artificial Sequence
  Description of Artificial Sequence: Synthetic peptide
SHAALGSGI

SEQ ID NO: 14198 - protein, 9 aa, Artificial Sequence
  Description of Artificial Sequence: Synthetic peptide
IHTDNGSNF

SEQ ID NO: 14199 - protein, 9 aa, Artificial Sequence
  Description of Artificial Sequence: Synthetic peptide
EQAPPLVSL

SEQ ID NO: 14200 - protein, 11 aa, Artificial Sequence
  Description of Artificial Sequence: Synthetic peptide
TQVDPGLADQL

SEQ ID NO: 14201 - protein, 10 aa, Artificial Sequence
  Description of Artificial Sequence: Synthetic peptide
HQDPVSKQPL

SEQ ID NO: 14202 - protein, 9 aa, Artificial Sequence
  Description of Artificial Sequence: Synthetic peptide
IRIGPGQTF

SEQ ID NO: 14203 - protein, 10 aa, Artificial Sequence
  Description of Artificial Sequence: Synthetic peptide
HQDPVPKQPL

SEQ ID NO: 14204 - protein, 9 aa, Artificial Sequence
  Description of Artificial Sequence: Synthetic peptide
FLDNVTENF

SEQ ID NO: 14205 - protein, 9 aa, Artificial Sequence
  Description of Artificial Sequence: Synthetic peptide
GHDQWTYQI

SEQ ID NO: 14206 - protein, 11 aa, Artificial Sequence
  Description of Artificial Sequence: Synthetic peptide
TQVDPDLADQL

SEQ ID NO: 14207 - protein, 9 aa, Artificial Sequence
  Description of Artificial Sequence: Synthetic peptide
TQDFWEVQL

SEQ ID NO: 14208 - protein, 9 aa, Artificial Sequence
  Description of Artificial Sequence: Synthetic peptide
NHTRENDTI

SEQ ID NO: 14209 - protein, 9 aa, Artificial Sequence
  Description of Artificial Sequence: Synthetic peptide
YRTQVDPGL

SEQ ID NO: 14210 - protein, 11 aa, Artificial Sequence
  Description of Artificial Sequence: Synthetic peptide
DHQDPVSKQPL

SEQ ID NO: 14211 - protein, 9 aa, Artificial Sequence
  Description of Artificial Sequence: Synthetic peptide
EQVPPLISL

SEQ ID NO: 14212 - protein, 9 aa, Artificial Sequence
  Description of Artificial Sequence: Synthetic peptide
SHLNKSITF

SEQ ID NO: 14213 - protein, 9 aa, Artificial Sequence
  Description of Artificial Sequence: Synthetic peptide
GHQAAMQML

SEQ ID NO: 14214 - protein, 9 aa, Artificial Sequence
  Description of Artificial Sequence: Synthetic peptide
THLEGKIIL

SEQ ID NO: 14215 - protein, 9 aa, Artificial Sequence
  Description of Artificial Sequence: Synthetic peptide
AHTNDVKQL

SEQ ID NO: 14216 - protein, 9 aa, Artificial Sequence
  Description of Artificial Sequence: Synthetic peptide
NHTRVNDIL

SEQ ID NO: 14217 - protein, 9 aa, Artificial Sequence
  Description of Artificial Sequence: Synthetic peptide
EHLKTAVQM

SEQ ID NO: 14218 - protein, 9 aa, Artificial Sequence
  Description of Artificial Sequence: Synthetic peptide
YRTQVDPDL

SEQ ID NO: 14219 - protein, 9 aa, Artificial Sequence
  Description of Artificial Sequence: Synthetic peptide
YQSNPYPKL

SEQ ID NO: 14220 - protein, 9 aa, Artificial Sequence
  Description of Artificial Sequence: Synthetic peptide
EQAPPLVSL

SEQ ID NO: 14221 - protein, 9 aa, Artificial Sequence
  Description of Artificial Sequence: Synthetic peptide
EQVPPLISL

SEQ ID NO: 14222 - protein, 9 aa, Artificial Sequence
  Description of Artificial Sequence: Synthetic peptide
YRTQVDPDL

SEQ ID NO: 14223 - protein, 9 aa, Artificial Sequence
  Description of Artificial Sequence: Synthetic peptide
NRSNGIITL

SEQ ID NO: 14224 - protein, 10 aa, Artificial Sequence
  Description of Artificial Sequence: Synthetic peptide
HQDPVSKQPL

SEQ ID NO: 14225 - protein, 11 aa, Artificial Sequence
  Description of Artificial Sequence: Synthetic peptide
TQVDPGLADQL

SEQ ID NO: 14226 - protein, 11 aa, Artificial Sequence
  Description of Artificial Sequence: Synthetic peptide
DHQDPVSKQPL

SEQ ID NO: 14227 - protein, 9 aa, Artificial Sequence
  Description of Artificial Sequence: Synthetic peptide
YRTQVDPGL

SEQ ID NO: 14228 - protein, 9 aa, Artificial Sequence
  Description of Artificial Sequence: Synthetic peptide
ERQGNVPSL

SEQ ID NO: 14229 - protein, 9 aa, Artificial Sequence
  Description of Artificial Sequence: Synthetic peptide
EHLKTAVQM

SEQ ID NO: 14230 - protein, 9 aa, Artificial Sequence
  Description of Artificial Sequence: Synthetic peptide
SQVTATSVL

SEQ ID NO: 14231 - protein, 9 aa, Artificial Sequence
  Description of Artificial Sequence: Synthetic peptide
ERQGTVSSL

SEQ ID NO: 14232 - protein, 9 aa, Artificial Sequence
  Description of Artificial Sequence: Synthetic peptide
GQKAIGTVL

SEQ ID NO: 14233 - protein, 9 aa, Artificial Sequence
  Description of Artificial Sequence: Synthetic peptide
IRIGPGQTF

SEQ ID NO: 14234 - protein, 11 aa, Artificial Sequence
  Description of Artificial Sequence: Synthetic peptide
TQVDPDLADQL

SEQ ID NO: 14235 - protein, 9 aa, Artificial Sequence
  Description of Artificial Sequence: Synthetic peptide
ERQGTGSSL

SEQ ID NO: 14236 - protein, 9 aa, Artificial Sequence
  Description of Artificial Sequence: Synthetic peptide
TRENDTITL

SEQ ID NO: 14237 - protein, 10 aa, Artificial Sequence
  Description of Artificial Sequence: Synthetic peptide
VQINNSNTSY

SEQ ID NO: 14238 - protein, 10 aa, Artificial Sequence
  Description of Artificial Sequence: Synthetic peptide
HQDPVPKQPL

SEQ ID NO: 14239 - protein, 9 aa, Artificial Sequence
  Description of Artificial Sequence: Synthetic peptide
IHTDNGSNF

SEQ ID NO: 14240 - protein, 9 aa, Artificial Sequence
  Description of Artificial Sequence: Synthetic peptide
FIPGNINNL

SEQ ID NO: 14241 - protein, 9 aa, Artificial Sequence
  Description of Artificial Sequence: Synthetic peptide
HQAISPRTL

SEQ ID NO: 14242 - protein, 9 aa, Artificial Sequence
  Description of Artificial Sequence: Synthetic peptide
SQVTSTSIL

SEQ ID NO: 14243 - protein, 9 aa, Artificial Sequence
  Description of Artificial Sequence: Synthetic peptide
ERIRQTPAA

SEQ ID NO: 14244 - protein, 8 aa, Artificial Sequence
  Description of Artificial Sequence: Synthetic peptide
MRQTPVAA

SEQ ID NO: 14245 - protein, 9 aa, Artificial Sequence
  Description of Artificial Sequence: Synthetic peptide
EQVDKLVSA

SEQ ID NO: 14246 - protein, 9 aa, Artificial Sequence
  Description of Artificial Sequence: Synthetic peptide
ERMRQTPVA

SEQ ID NO: 14247 - protein, 9 aa, Artificial Sequence
  Description of Artificial Sequence: Synthetic peptide
YQQKTQPAA

SEQ ID NO: 14248 - protein, 9 aa, Artificial Sequence
  Description of Artificial Sequence: Synthetic peptide
TIYRLIESA

SEQ ID NO: 14249 - protein, 10 aa, Artificial Sequence
  Description of Artificial Sequence: Synthetic peptide
SQYALGIIQA

SEQ ID NO: 14250 - protein, 10 aa, Artificial Sequence
  Description of Artificial Sequence: Synthetic peptide
ERMRQTPVAA

SEQ ID NO: 14251 - protein, 9 aa, Artificial Sequence
  Description of Artificial Sequence: Synthetic peptide
VQLGIPHPA

SEQ ID NO: 14252 - protein, 8 aa, Artificial Sequence
  Description of Artificial Sequence: Synthetic peptide
DQVPIEIC

SEQ ID NO: 14253 - protein, 8 aa, Artificial Sequence
  Description of Artificial Sequence: Synthetic peptide
SQVTATSV

SEQ ID NO: 14254 - protein, 8 aa, Artificial Sequence
  Description of Artificial Sequence: Synthetic peptide
DQIPIEIC

SEQ ID NO: 14255 - protein, 8 aa, Artificial Sequence
  Description of Artificial Sequence: Synthetic peptide
THGIKPVV

SEQ ID NO: 14256 - protein, 8 aa, Artificial Sequence
  Description of Artificial Sequence: Synthetic peptide
THGIRPVV

SEQ ID NO: 14257 - protein, 9 aa, Artificial Sequence
  Description of Artificial Sequence: Synthetic peptide
SQQKTQPAA

SEQ ID NO: 14258 - protein, 9 aa, Artificial Sequence
  Description of Artificial Sequence: Synthetic peptide
TIYRLIEEA

SEQ ID NO: 14259 - protein, 10 aa, Artificial Sequence
  Description of Artificial Sequence: Synthetic peptide
YQQKTQPAAA

SEQ ID NO: 14260 - protein, 9 aa, Artificial Sequence
  Description of Artificial Sequence: Synthetic peptide
YQLETEPIA

SEQ ID NO: 14261 - protein, 8 aa, Artificial Sequence
  Description of Artificial Sequence: Synthetic peptide
TDVVPLTA

SEQ ID NO: 14262 - protein, 8 aa, Artificial Sequence
  Description of Artificial Sequence: Synthetic peptide
TEVVQKVA

SEQ ID NO: 14263 - protein, 8 aa, Artificial Sequence
  Description of Artificial Sequence: Synthetic peptide
QQKTQPAA

SEQ ID NO: 14264 - protein, 8 aa, Artificial Sequence
  Description of Artificial Sequence: Synthetic peptide
SMTLTVQA

SEQ ID NO: 14265 - protein, 8 aa, Artificial Sequence
  Description of Artificial Sequence: Synthetic peptide
DQVSIEIC

SEQ ID NO: 14266 - protein, 9 aa, Artificial Sequence
  Description of Artificial Sequence: Synthetic peptide
QQKTQPAAA

SEQ ID NO: 14267 - protein, 9 aa, Artificial Sequence
  Description of Artificial Sequence: Synthetic peptide
TIYKLIENA

SEQ ID NO: 14268 - protein, 9 aa, Artificial Sequence
  Description of Artificial Sequence: Synthetic peptide
QRVGQAMYA

SEQ ID NO: 14269 - protein, 8 aa, Artificial Sequence
  Description of Artificial Sequence: Synthetic peptide
DEALLTAV

SEQ ID NO: 14270 - protein, 9 aa, Artificial Sequence
  Description of Artificial Sequence: Synthetic peptide
EQVDKLVST

SEQ ID NO: 14271 - protein, 9 aa, Artificial Sequence
  Description of Artificial Sequence: Synthetic peptide
QQHLLQLTV

SEQ ID NO: 14272 - protein, 8 aa, Artificial Sequence
  Description of Artificial Sequence: Synthetic peptide
DRTAIAVA

SEQ ID NO: 14273 - protein, 9 aa, Artificial Sequence
  Description of Artificial Sequence: Synthetic peptide
VRIEPVGVA

SEQ ID NO: 14274 - protein, 8 aa, Artificial Sequence
  Description of Artificial Sequence: Synthetic peptide
ERIRQTPA

SEQ ID NO: 14275 - protein, 9 aa, Artificial Sequence
  Description of Artificial Sequence: Synthetic peptide
EQAPPLVSL

SEQ ID NO: 14276 - protein, 9 aa, Artificial Sequence
  Description of Artificial Sequence: Synthetic peptide
IRAAEGVGA

SEQ ID NO: 14277 - protein, 8 aa, Artificial Sequence
  Description of Artificial Sequence: Synthetic peptide
DRLHPVQA

SEQ ID NO: 14278 - protein, 10 aa, Artificial Sequence
  Description of Artificial Sequence: Synthetic peptide
TETTNQKTEL

SEQ ID NO: 14279 - protein, 9 aa, Artificial Sequence
  Description of Artificial Sequence: Synthetic peptide
MEDDDKEVL

SEQ ID NO: 14280 - protein, 11 aa, Artificial Sequence
  Description of Artificial Sequence: Synthetic peptide
GEEQAPPLVSL

SEQ ID NO: 14281 - protein, 9 aa, Artificial Sequence
  Description of Artificial Sequence: Synthetic peptide
MEDEDREVL

SEQ ID NO: 14282 - protein, 10 aa, Artificial Sequence
  Description of Artificial Sequence: Synthetic peptide
KEIDNYTDTI

SEQ ID NO: 14283 - protein, 10 aa, Artificial Sequence
  Description of Artificial Sequence: Synthetic peptide
KEIGNYTDTI

SEQ ID NO: 14284 - protein, 10 aa, Artificial Sequence
  Description of Artificial Sequence: Synthetic peptide
IEVRDTKEAL

SEQ ID NO: 14285 - protein, 8 aa, Artificial Sequence
  Description of Artificial Sequence: Synthetic peptide
KEFNGTGL

SEQ ID NO: 14286 - protein, 10 aa, Artificial Sequence
  Description of Artificial Sequence: Synthetic peptide
EEQAPPLVSL

SEQ ID NO: 14287 - protein, 10 aa, Artificial Sequence
  Description of Artificial Sequence: Synthetic peptide
KEMYPPLTSL

SEQ ID NO: 14288 - protein, 10 aa, Artificial Sequence
  Description of Artificial Sequence: Synthetic peptide
KEQVPPLISL

SEQ ID NO: 14289 - protein, 9 aa, Artificial Sequence
  Description of Artificial Sequence: Synthetic peptide
AEVKNLTNI

SEQ ID NO: 14290 - protein, 9 aa, Artificial Sequence
  Description of Artificial Sequence: Synthetic peptide
SEGATPQDL

SEQ ID NO: 14291 - protein, 9 aa, Artificial Sequence
  Description of Artificial Sequence: Synthetic peptide
SESAIRNAI

SEQ ID NO: 14292 - protein, 9 aa, Artificial Sequence
  Description of Artificial Sequence: Synthetic peptide
GEGNESETL

SEQ ID NO: 14293 - protein, 8 aa, Artificial Sequence
  Description of Artificial Sequence: Synthetic peptide
IETVPVKL

SEQ ID NO: 14294 - protein, 10 aa, Artificial Sequence
  Description of Artificial Sequence: Synthetic peptide
QELKNSAISL

SEQ ID NO: 14295 - protein, 9 aa, Artificial Sequence
  Description of Artificial Sequence: Synthetic peptide
VEGQLREAL

SEQ ID NO: 14296 - protein, 10 aa, Artificial Sequence
  Description of Artificial Sequence: Synthetic peptide
SESAIRNAIL

SEQ ID NO: 14297 - protein, 10 aa, Artificial Sequence
  Description of Artificial Sequence: Synthetic peptide
REIKNSAIDL

SEQ ID NO: 14298 - protein, 9 aa, Artificial Sequence
  Description of Artificial Sequence: Synthetic peptide
QEKNEQDLL

SEQ ID NO: 14299 - protein, 11 aa, Artificial Sequence
  Description of Artificial Sequence: Synthetic peptide
SEIVNQIIEQL

SEQ ID NO: 14300 - protein, 8 aa, Artificial Sequence
  Description of Artificial Sequence: Synthetic peptide
TELQAIQL

SEQ ID NO: 14301 - protein, 11 aa, Artificial Sequence
  Description of Artificial Sequence: Synthetic peptide
AEGTDRIIEVL

SEQ ID NO: 14302 - protein, 10 aa, Artificial Sequence
  Description of Artificial Sequence: Synthetic peptide
IEAQQHLLQL

SEQ ID NO: 14303 - protein, 11 aa, Artificial Sequence
  Description of Artificial Sequence: Synthetic peptide
SEGDAEELAAL

SEQ ID NO: 14304 - protein, 9 aa, Artificial Sequence
  Description of Artificial Sequence: Synthetic peptide
SESEIVNQI

SEQ ID NO: 14305 - protein, 11 aa, Artificial Sequence
  Description of Artificial Sequence: Synthetic peptide
AEVKNLTNITI

SEQ ID NO: 14306 - protein, 11 aa, Artificial Sequence
  Description of Artificial Sequence: Synthetic peptide
REIKNSAIDLL

SEQ ID NO: 14307 - protein, 10 aa, Artificial Sequence
  Description of Artificial Sequence: Synthetic peptide
AEHLKTAVQM

SEQ ID NO: 14308 - protein, 10 aa, Artificial Sequence
  Description of Artificial Sequence: Synthetic peptide
AERQGTGSSL

SEQ ID NO: 14309 - protein, 8 aa, Artificial Sequence
  Description of Artificial Sequence: Synthetic peptide
IEAQQHLL

SEQ ID NO: 14310 - protein, 9 aa, Artificial Sequence
  Description of Artificial Sequence: Synthetic peptide
AEVKNLTNI

SEQ ID NO: 14311 - protein, 10 aa, Artificial Sequence
  Description of Artificial Sequence: Synthetic peptide
TETTNQKTEL

SEQ ID NO: 14312 - protein, 10 aa, Artificial Sequence
  Description of Artificial Sequence: Synthetic peptide
KEQVPPLISL

SEQ ID NO: 14313 - protein, 11 aa, Artificial Sequence
  Description of Artificial Sequence: Synthetic peptide
AEVKNLTNITI

SEQ ID NO: 14314 - protein, 10 aa, Artificial Sequence
  Description of Artificial Sequence: Synthetic peptide
KEMYPPLTSL

SEQ ID NO: 14315 - protein, 11 aa, Artificial Sequence
  Description of Artificial Sequence: Synthetic peptide
SEIVNQIIEQL

SEQ ID NO: 14316 - protein, 8 aa, Artificial Sequence
  Description of Artificial Sequence: Synthetic peptide
TDIQTKEL

SEQ ID NO: 14317 - protein, 10 aa, Artificial Sequence
  Description of Artificial Sequence: Synthetic peptide
AEHLKTAVQM

SEQ ID NO: 14318 - protein, 11 aa, Artificial Sequence
  Description of Artificial Sequence: Synthetic peptide
AEGTDRIIEVL

SEQ ID NO: 14319 - protein, 8 aa, Artificial Sequence
  Description of Artificial Sequence: Synthetic peptide
KEFNGTGL

SEQ ID NO: 14320 - protein, 10 aa, Artificial Sequence
  Description of Artificial Sequence: Synthetic peptide
AERQGNVPSL

SEQ ID NO: 14321 - protein, 9 aa, Artificial Sequence
  Description of Artificial Sequence: Synthetic peptide
SESAIRNAI

SEQ ID NO: 14322 - protein, 11 aa, Artificial Sequence
  Description of Artificial Sequence: Synthetic peptide
GEEQAPPLVSL

SEQ ID NO: 14323 - protein, 10 aa, Artificial Sequence
  Description of Artificial Sequence: Synthetic peptide
KEIDNYTDTI

SEQ ID NO: 14324 - protein, 8 aa, Artificial Sequence
  Description of Artificial Sequence: Synthetic peptide
TELQAIQL

SEQ ID NO: 14325 - protein, 8 aa, Artificial Sequence
  Description of Artificial Sequence: Synthetic peptide
SDINGTSL

SEQ ID NO: 14326 - protein, 10 aa, Artificial Sequence
  Description of Artificial Sequence: Synthetic peptide
EEQAPPLVSL

SEQ ID NO: 14327 - protein, 8 aa, Artificial Sequence
  Description of Artificial Sequence: Synthetic peptide
TDVVPLTV

SEQ ID NO: 14328 - protein, 10 aa, Artificial Sequence
  Description of Artificial Sequence: Synthetic peptide
KEIGNYTDTI

SEQ ID NO: 14329 - protein, 9 aa, Artificial Sequence
  Description of Artificial Sequence: Synthetic peptide
GEFFYCNTV

SEQ ID NO: 14330 - protein, 10 aa, Artificial Sequence
  Description of Artificial Sequence: Synthetic peptide
GEIIGDIRKA

SEQ ID NO: 14331 - protein, 10 aa, Artificial Sequence
  Description of Artificial Sequence: Synthetic peptide
IEAQQHLLQL

SEQ ID NO: 14332 - protein, 10 aa, Artificial Sequence
  Description of Artificial Sequence: Synthetic peptide
SESAIRNAIL

SEQ ID NO: 14333 - protein, 8 aa, Artificial Sequence
  Description of Artificial Sequence: Synthetic peptide
IETVPVKL

SEQ ID NO: 14334 - protein, 9 aa, Artificial Sequence
  Description of Artificial Sequence: Synthetic peptide
TEVVQKVAT

SEQ ID NO: 14335 - protein, 10 aa, Artificial Sequence
  Description of Artificial Sequence: Synthetic peptide
AERQGTVSSL

SEQ ID NO: 14336 - protein, 10 aa, Artificial Sequence
  Description of Artificial Sequence: Synthetic peptide
QELKNSAISL

SEQ ID NO: 14337 - protein, 9 aa, Artificial Sequence
  Description of Artificial Sequence: Synthetic peptide
SESEIVNQI

SEQ ID NO: 14338 - protein, 9 aa, Artificial Sequence
  Description of Artificial Sequence: Synthetic peptide
SEIHQNPVP

SEQ ID NO: 14339 - protein, 9 aa, Artificial Sequence
  Description of Artificial Sequence: Synthetic peptide
VEGQLREAL

SEQ ID NO: 14340 - protein, 8 aa, Artificial Sequence
  Description of Artificial Sequence: Synthetic peptide
VEAIIRTL

SEQ ID NO: 14341 - protein, 8 aa, Artificial Sequence
  Description of Artificial Sequence: Synthetic peptide
TELQAIHL

SEQ ID NO: 14342 - protein, 10 aa, Artificial Sequence
  Description of Artificial Sequence: Synthetic peptide
TEKGVGSPQI

SEQ ID NO: 14343 - protein, 10 aa, Artificial Sequence
  Description of Artificial Sequence: Synthetic peptide
GEIIGDTRKA

SEQ ID NO: 14344 - protein, 9 aa, Artificial Sequence
  Description of Artificial Sequence: Synthetic peptide
GEQDKTRSV

SEQ ID NO: 14345 - protein, 8 aa, Artificial Sequence
  Description of Artificial Sequence: Synthetic peptide
IEAQQHLL

SEQ ID NO: 14346 - protein, 10 aa, Artificial Sequence
  Description of Artificial Sequence: Synthetic peptide
AERQGTGSSL

SEQ ID NO: 14347 - protein, 9 aa, Artificial Sequence
  Description of Artificial Sequence: Synthetic peptide
SDFNLPPVV

SEQ ID NO: 14348 - protein, 9 aa, Artificial Sequence
  Description of Artificial Sequence: Synthetic peptide
SERILSTCL

SEQ ID NO: 14349 - protein, 10 aa, Artificial Sequence
  Description of Artificial Sequence: Synthetic peptide
IEVRDTKEAL

SEQ ID NO: 14350 - protein, 9 aa, Artificial Sequence
  Description of Artificial Sequence: Synthetic peptide
AEAMSQVTA

SEQ ID NO: 14351 - protein, 9 aa, Artificial Sequence
  Description of Artificial Sequence: Synthetic peptide
MEDEDREVL

SEQ ID NO: 14352 - protein, 11 aa, Artificial Sequence
  Description of Artificial Sequence: Synthetic peptide
SELVNQIIEQL

SEQ ID NO: 14353 - protein, 9 aa, Artificial Sequence
  Description of Artificial Sequence: Synthetic peptide
TEVVQKIAT

SEQ ID NO: 14354 - protein, 9 aa, Artificial Sequence
  Description of Artificial Sequence: Synthetic peptide
SEGATPQDL

SEQ ID NO: 14355 - protein, 10 aa, Artificial Sequence
  Description of Artificial Sequence: Synthetic peptide
HEISERILTT

SEQ ID NO: 14356 - protein, 8 aa, Artificial Sequence
  Description of Artificial Sequence: Synthetic peptide
VEITTHSF

SEQ ID NO: 14357 - protein, 10 aa, Artificial Sequence
  Description of Artificial Sequence: Synthetic peptide
SERGVGSPQI

SEQ ID NO: 14358 - protein, 11 aa, Artificial Sequence
  Description of Artificial Sequence: Synthetic peptide
VEAIIRTLQQL

SEQ ID NO: 14359 - protein, 9 aa, Artificial Sequence
  Description of Artificial Sequence: Synthetic peptide
SESELVNQI

SEQ ID NO: 14360 - protein, 9 aa, Artificial Sequence
  Description of Artificial Sequence: Synthetic peptide
SEIHQNPVP

SEQ ID NO: 14361 - protein, 10 aa, Artificial Sequence
  Description of Artificial Sequence: Synthetic peptide
GEIIGDIRKA

SEQ ID NO: 14362 - protein, 9 aa, Artificial Sequence
  Description of Artificial Sequence: Synthetic peptide
AEAMSQVTA

SEQ ID NO: 14363 - protein, 10 aa, Artificial Sequence
  Description of Artificial Sequence: Synthetic peptide
GEIIGDTRKA

SEQ ID NO: 14364 - protein, 9 aa, Artificial Sequence
  Description of Artificial Sequence: Synthetic peptide
LETEPIIGA

SEQ ID NO: 14365 - protein, 9 aa, Artificial Sequence
  Description of Artificial Sequence: Synthetic peptide
LETEPIAGA

SEQ ID NO: 14366 - protein, 11 aa, Artificial Sequence
  Description of Artificial Sequence: Synthetic peptide
AEWDRLHPVQA

SEQ ID NO: 14367 - protein, 9 aa, Artificial Sequence
  Description of Artificial Sequence: Synthetic peptide
KEFNGTGLC

SEQ ID NO: 14368 - protein, 8 aa, Artificial Sequence
  Description of Artificial Sequence: Synthetic peptide
TEVVQKVA

SEQ ID NO: 14369 - protein, 9 aa, Artificial Sequence
  Description of Artificial Sequence: Synthetic peptide
TELQAIHLA

SEQ ID NO: 14370 - protein, 9 aa, Artificial Sequence
  Description of Artificial Sequence: Synthetic peptide
TETLLVQNA

SEQ ID NO: 14371 - protein, 9 aa, Artificial Sequence
  Description of Artificial Sequence: Synthetic peptide
LETEPILGA

SEQ ID NO: 14372 - protein, 9 aa, Artificial Sequence
  Description of Artificial Sequence: Synthetic peptide
EEVGFPVRP

SEQ ID NO: 14373 - protein, 9 aa, Artificial Sequence
  Description of Artificial Sequence: Synthetic peptide
QEFGIPYNP

SEQ ID NO: 14374 - protein, 9 aa, Artificial Sequence
  Description of Artificial Sequence: Synthetic peptide
RENDTITLP

SEQ ID NO: 14375 - protein, 8 aa, Artificial Sequence
  Description of Artificial Sequence: Synthetic peptide
RDFILIAA

SEQ ID NO: 14376 - protein, 10 aa, Artificial Sequence
  Description of Artificial Sequence: Synthetic peptide
SDFNLPPVVA

SEQ ID NO: 14377 - protein, 8 aa, Artificial Sequence
  Description of Artificial Sequence: Synthetic peptide
GEGITPSP

SEQ ID NO: 14378 - protein, 8 aa, Artificial Sequence
  Description of Artificial Sequence: Synthetic peptide
SESAIRKA

SEQ ID NO: 14379 - protein, 9 aa, Artificial Sequence
  Description of Artificial Sequence: Synthetic peptide
QEFGVPYNP

SEQ ID NO: 14380 - protein, 9 aa, Artificial Sequence
  Description of Artificial Sequence: Synthetic peptide
GEQDKTRSV

SEQ ID NO: 14381 - protein, 9 aa, Artificial Sequence
  Description of Artificial Sequence: Synthetic peptide
SESAIRNAI

SEQ ID NO: 14382 - protein, 8 aa, Artificial Sequence
  Description of Artificial Sequence: Synthetic peptide
TDIQTKEL

SEQ ID NO: 14383 - protein, 9 aa, Artificial Sequence
  Description of Artificial Sequence: Synthetic peptide
GEQDKTRSV

SEQ ID NO: 14384 - protein, 9 aa, Artificial Sequence
  Description of Artificial Sequence: Synthetic peptide
SERILSTCL

SEQ ID NO: 14385 - protein, 8 aa, Artificial Sequence
  Description of Artificial Sequence: Synthetic peptide
AEHLKTAV

SEQ ID NO: 14386 - protein, 9 aa, Artificial Sequence
  Description of Artificial Sequence: Synthetic peptide
MEDEDREVL

SEQ ID NO: 14387 - protein, 10 aa, Artificial Sequence
  Description of Artificial Sequence: Synthetic peptide
AERQGTGSSL

SEQ ID NO: 14388 - protein, 10 aa, Artificial Sequence
  Description of Artificial Sequence: Synthetic peptide
KEQVPPLISL

SEQ ID NO: 14389 - protein, 9 aa, Artificial Sequence
  Description of Artificial Sequence: Synthetic peptide
VEGQLREAL

SEQ ID NO: 14390 - protein, 8 aa, Artificial Sequence
  Description of Artificial Sequence: Synthetic peptide
SDINGTSL

SEQ ID NO: 14391 - protein, 8 aa, Artificial Sequence
  Description of Artificial Sequence: Synthetic peptide
KEFNGTGL

SEQ ID NO: 14392 - protein, 9 aa, Artificial Sequence
  Description of Artificial Sequence: Synthetic peptide
SESAIRKAI

SEQ ID NO: 14393 - protein, 10 aa, Artificial Sequence
  Description of Artificial Sequence: Synthetic peptide
AERQGNVPSL

SEQ ID NO: 14394 - protein, 10 aa, Artificial Sequence
  Description of Artificial Sequence: Synthetic peptide
AERQGTVSSL

SEQ ID NO: 14395 - protein, 8 aa, Artificial Sequence
  Description of Artificial Sequence: Synthetic peptide
TDRIIEVL

SEQ ID NO: 14396 - protein, 10 aa, Artificial Sequence
  Description of Artificial Sequence: Synthetic peptide
SESAIRNAIL

SEQ ID NO: 14397 - protein, 10 aa, Artificial Sequence
  Description of Artificial Sequence: Synthetic peptide
TETTNQKTEL

SEQ ID NO: 14398 - protein, 9 aa, Artificial Sequence
  Description of Artificial Sequence: Synthetic peptide
QERNEQELL

SEQ ID NO: 14399 - protein, 10 aa, Artificial Sequence
  Description of Artificial Sequence: Synthetic peptide
KEMYPPLTSL

SEQ ID NO: 14400 - protein, 10 aa, Artificial Sequence
  Description of Artificial Sequence: Synthetic peptide
EEQAPPLVSL

SEQ ID NO: 14401 - protein, 8 aa, Artificial Sequence
  Description of Artificial Sequence: Synthetic peptide
VEAIIRTL

SEQ ID NO: 14402 - protein, 8 aa, Artificial Sequence
  Description of Artificial Sequence: Synthetic peptide
TELQAIQL

SEQ ID NO: 14403 - protein, 11 aa, Artificial Sequence
  Description of Artificial Sequence: Synthetic peptide
GEEQAPPLVSL

SEQ ID NO: 14404 - protein, 9 aa, Artificial Sequence
  Description of Artificial Sequence: Synthetic peptide
AEVKNLTNI

SEQ ID NO: 14405 - protein, 8 aa, Artificial Sequence
  Description of Artificial Sequence: Synthetic peptide
IEAQQHLL

SEQ ID NO: 14406 - protein, 9 aa, Artificial Sequence
  Description of Artificial Sequence: Synthetic peptide
QEKNEQDLL

SEQ ID NO: 14407 - protein, 9 aa, Artificial Sequence
  Description of Artificial Sequence: Synthetic peptide
KEKGGLEGL

SEQ ID NO: 14408 - protein, 10 aa, Artificial Sequence
  Description of Artificial Sequence: Synthetic peptide
TEKGVGSPQI

SEQ ID NO: 14409 - protein, 9 aa, Artificial Sequence
  Description of Artificial Sequence: Synthetic peptide
AEAMSQVTA

SEQ ID NO: 14410 - protein, 8 aa, Artificial Sequence
  Description of Artificial Sequence: Synthetic peptide
TELQAIHL

SEQ ID NO: 14411 - protein, 10 aa, Artificial Sequence
  Description of Artificial Sequence: Synthetic peptide
AEHLKTAVQM

SEQ ID NO: 14412 - protein, 8 aa, Artificial Sequence
  Description of Artificial Sequence: Synthetic peptide
TERQANFL

SEQ ID NO: 14413 - protein, 9 aa, Artificial Sequence
  Description of Artificial Sequence: Synthetic peptide
SEIHQNPVP

SEQ ID NO: 14414 - protein, 9 aa, Artificial Sequence
  Description of Artificial Sequence: Synthetic peptide
SEEMKNCSF

SEQ ID NO: 14415 - protein, 8 aa, Artificial Sequence
  Description of Artificial Sequence: Synthetic peptide
LDRTAIAV

SEQ ID NO: 14416 - protein, 8 aa, Artificial Sequence
  Description of Artificial Sequence: Synthetic peptide
GQMVHQAL

SEQ ID NO: 14417 - protein, 8 aa, Artificial Sequence
  Description of Artificial Sequence: Synthetic peptide
GQMVHQSL

SEQ ID NO: 14418 - protein, 9 aa, Artificial Sequence
  Description of Artificial Sequence: Synthetic peptide
KDIDGKEIL

SEQ ID NO: 14419 - protein, 9 aa, Artificial Sequence
  Description of Artificial Sequence: Synthetic peptide
TEVVQKVAT

SEQ ID NO: 14420 - protein, 9 aa, Artificial Sequence
  Description of Artificial Sequence: Synthetic peptide
KEKGGLDGL

SEQ ID NO: 14421 - protein, 9 aa, Artificial Sequence
  Description of Artificial Sequence: Synthetic peptide
MEDDDKEVL

SEQ ID NO: 14422 - protein, 8 aa, Artificial Sequence
  Description of Artificial Sequence: Synthetic peptide
VEITTHSF

SEQ ID NO: 14423 - protein, 9 aa, Artificial Sequence
  Description of Artificial Sequence: Synthetic peptide
SERILTTYL

SEQ ID NO: 14424 - protein, 9 aa, Artificial Sequence
  Description of Artificial Sequence: Synthetic peptide
TEMEKEGKI

SEQ ID NO: 14425 - protein, 8 aa, Artificial Sequence
  Description of Artificial Sequence: Synthetic peptide
SERILTTY

SEQ ID NO: 14426 - protein, 9 aa, Artificial Sequence
  Description of Artificial Sequence: Synthetic peptide
GEQDKDRSV

SEQ ID NO: 14427 - protein, 10 aa, Artificial Sequence
  Description of Artificial Sequence: Synthetic peptide
SERGVGSPQI

SEQ ID NO: 14428 - protein, 10 aa, Artificial Sequence
  Description of Artificial Sequence: Synthetic peptide
QELKNSAISL

SEQ ID NO: 14429 - protein, 9 aa, Artificial Sequence
  Description of Artificial Sequence: Synthetic peptide
GEQDKDRSI

SEQ ID NO: 14430 - protein, 11 aa, Artificial Sequence
  Description of Artificial Sequence: Synthetic peptide
AEQASQEVKGW

SEQ ID NO: 14431 - protein, 11 aa, Artificial Sequence
  Description of Artificial Sequence: Synthetic peptide
AEQATQEVKGW

SEQ ID NO: 14432 - protein, 11 aa, Artificial Sequence
  Description of Artificial Sequence: Synthetic peptide
AEQATQEVKNW

SEQ ID NO: 14433 - protein, 11 aa, Artificial Sequence
  Description of Artificial Sequence: Synthetic peptide
SEVNIVTDSQY

SEQ ID NO: 14434 - protein, 9 aa, Artificial Sequence
  Description of Artificial Sequence: Synthetic peptide
EEIWGNMTW

SEQ ID NO: 14435 - protein, 9 aa, Artificial Sequence
  Description of Artificial Sequence: Synthetic peptide
SESAIRNAI

SEQ ID NO: 14436 - protein, 9 aa, Artificial Sequence
  Description of Artificial Sequence: Synthetic peptide
SESAIRKAI

SEQ ID NO: 14437 - protein, 11 aa, Artificial Sequence
  Description of Artificial Sequence: Synthetic peptide
GEIIGDIRKAY

SEQ ID NO: 14438 - protein, 9 aa, Artificial Sequence
  Description of Artificial Sequence: Synthetic peptide
DEIWGNMTW

SEQ ID NO: 14439 - protein, 11 aa, Artificial Sequence
  Description of Artificial Sequence: Synthetic peptide
NEQDLLALDKW

SEQ ID NO: 14440 - protein, 9 aa, Artificial Sequence
  Description of Artificial Sequence: Synthetic peptide
SESEIVNQI

SEQ ID NO: 14441 - protein, 10 aa, Artificial Sequence
  Description of Artificial Sequence: Synthetic peptide
EEQAPPLVSL

SEQ ID NO: 14442 - protein, 11 aa, Artificial Sequence
  Description of Artificial Sequence: Synthetic peptide
HEISERILTTY

SEQ ID NO: 14443 - protein, 10 aa, Artificial Sequence
  Description of Artificial Sequence: Synthetic peptide
NETPGIRYQY

SEQ ID NO: 14444 - protein, 9 aa, Artificial Sequence
  Description of Artificial Sequence: Synthetic peptide
QELLALDKW

SEQ ID NO: 14445 - protein, 9 aa, Artificial Sequence
  Description of Artificial Sequence: Synthetic peptide
AETGQETAY

SEQ ID NO: 14446 - protein, 11 aa, Artificial Sequence
  Description of Artificial Sequence: Synthetic peptide
EEQGEIKNCSF

SEQ ID NO: 14447 - protein, 9 aa, Artificial Sequence
  Description of Artificial Sequence: Synthetic peptide
KENPEIVIY

SEQ ID NO: 14448 - protein, 11 aa, Artificial Sequence
  Description of Artificial Sequence: Synthetic peptide
NEQELLALDKW

SEQ ID NO: 14449 - protein, 11 aa, Artificial Sequence
  Description of Artificial Sequence: Synthetic peptide
SEVNIVTDSQY

SEQ ID NO: 14450 - protein, 11 aa, Artificial Sequence
  Description of Artificial Sequence: Synthetic peptide
AEQATQEVKGW

SEQ ID NO: 14451 - protein, 11 aa, Artificial Sequence
  Description of Artificial Sequence: Synthetic peptide
AEQASQEVKGW

SEQ ID NO: 14452 - protein, 11 aa, Artificial Sequence
  Description of Artificial Sequence: Synthetic peptide
AEQATQEVKNW

SEQ ID NO: 14453 - protein, 9 aa, Artificial Sequence
  Description of Artificial Sequence: Synthetic peptide
SESAIRKAI

SEQ ID NO: 14454 - protein, 9 aa, Artificial Sequence
  Description of Artificial Sequence: Synthetic peptide
SESEIVNQI

SEQ ID NO: 14455 - protein, 9 aa, Artificial Sequence
  Description of Artificial Sequence: Synthetic peptide
SESAIRNAI

SEQ ID NO: 14456 - protein, 9 aa, Artificial Sequence
  Description of Artificial Sequence: Synthetic peptide
EEIWGNMTW

SEQ ID NO: 14457 - protein, 11 aa, Artificial Sequence
  Description of Artificial Sequence: Synthetic peptide
AEVQKQGHDQW

SEQ ID NO: 14458 - protein, 11 aa, Artificial Sequence
  Description of Artificial Sequence: Synthetic peptide
AEIQKQGHDQW

SEQ ID NO: 14459 - protein, 10 aa, Artificial Sequence
  Description of Artificial Sequence: Synthetic peptide
NETPGIRYQY

SEQ ID NO: 14460 - protein, 11 aa, Artificial Sequence
  Description of Artificial Sequence: Synthetic peptide
GEIIGDIRKAY

SEQ ID NO: 14461 - protein, 9 aa, Artificial Sequence
  Description of Artificial Sequence: Synthetic peptide
DEIWGNMTW

SEQ ID NO: 14462 - protein, 9 aa, Artificial Sequence
  Description of Artificial Sequence: Synthetic peptide
AEVKNLTNI

SEQ ID NO: 14463 - protein, 11 aa, Artificial Sequence
  Description of Artificial Sequence: Synthetic peptide
NEQDLLALDKW

SEQ ID NO: 14464 - protein, 9 aa, Artificial Sequence
  Description of Artificial Sequence: Synthetic peptide
SESELVNQI

SEQ ID NO: 14465 - protein, 11 aa, Artificial Sequence
  Description of Artificial Sequence: Synthetic peptide
HEISERILTTY

SEQ ID NO: 14466 - protein, 9 aa, Artificial Sequence
  Description of Artificial Sequence: Synthetic peptide
QELLALDKW

SEQ ID NO: 14467 - protein, 10 aa, Artificial Sequence
  Description of Artificial Sequence: Synthetic peptide
EEQAPPLVSL

SEQ ID NO: 14468 - protein, 9 aa, Artificial Sequence
  Description of Artificial Sequence: Synthetic peptide
EELLKAVRY

SEQ ID NO: 14469 - protein, 10 aa, Artificial Sequence
  Description of Artificial Sequence: Synthetic peptide
KEIDNYTKTI

SEQ ID NO: 14470 - protein, 11 aa, Artificial Sequence
  Description of Artificial Sequence: Synthetic peptide
NEQELLALDKW

SEQ ID NO: 14471 - protein, 10 aa, Artificial Sequence
  Description of Artificial Sequence: Synthetic peptide
RETKIGKAGY

SEQ ID NO: 14472 - protein, 11 aa, Artificial Sequence
  Description of Artificial Sequence: Synthetic peptide
KEIDNYTKTIY

SEQ ID NO: 14473 - protein, 9 aa, Artificial Sequence
  Description of Artificial Sequence: Synthetic peptide
AETGQETAY

SEQ ID NO: 14474 - protein, 9 aa, Artificial Sequence
  Description of Artificial Sequence: Synthetic peptide
KENPEIVIY

SEQ ID NO: 14475 - protein, 9 aa, Artificial Sequence
  Description of Artificial Sequence: Synthetic peptide
NEIWENMTW

SEQ ID NO: 14476 - protein, 9 aa, Artificial Sequence
  Description of Artificial Sequence: Synthetic peptide
TEMEKEGKI

SEQ ID NO: 14477 - protein, 9 aa, Artificial Sequence
  Description of Artificial Sequence: Synthetic peptide
AEGDIVIRS

SEQ ID NO: 14478 - protein, 10 aa, Artificial Sequence
  Description of Artificial Sequence: Synthetic peptide
EEHEKYHSNW

SEQ ID NO: 14479 - protein, 11 aa, Artificial Sequence
  Description of Artificial Sequence: Synthetic peptide
KEISNYTGTIY

SEQ ID NO: 14480 - protein, 9 aa, Artificial Sequence
  Description of Artificial Sequence: Synthetic peptide
DEDREVLKW

SEQ ID NO: 14481 - protein, 10 aa, Artificial Sequence
  Description of Artificial Sequence: Synthetic peptide
TEPIIGAETF

SEQ ID NO: 14482 - protein, 10 aa, Artificial Sequence
  Description of Artificial Sequence: Synthetic peptide
EEHEKYHNNW

SEQ ID NO: 14483 - protein, 9 aa, Artificial Sequence
  Description of Artificial Sequence: Synthetic peptide
AETGQEAAY

SEQ ID NO: 14484 - protein, 10 aa, Artificial Sequence
  Description of Artificial Sequence: Synthetic peptide
AETGQEAAYF

SEQ ID NO: 14485 - protein, 11 aa, Artificial Sequence
  Description of Artificial Sequence: Synthetic peptide
MEDEDREVLKW

SEQ ID NO: 14486 - protein, 10 aa, Artificial Sequence
  Description of Artificial Sequence: Synthetic peptide
QEEIWGNMTW

SEQ ID NO: 14487 - protein, 10 aa, Artificial Sequence
  Description of Artificial Sequence: Synthetic peptide
AETGQETAYF

SEQ ID NO: 14488 - protein, 11 aa, Artificial Sequence
  Description of Artificial Sequence: Synthetic peptide
MEDEDREVLRW

SEQ ID NO: 14489 - protein, 10 aa, Artificial Sequence
  Description of Artificial Sequence: Synthetic peptide
KEMYPPLTSL

SEQ ID NO: 14490 - protein, 9 aa, Artificial Sequence
  Description of Artificial Sequence: Synthetic peptide
DEDREVLRW

SEQ ID NO: 14491 - protein, 8 aa, Artificial Sequence
  Description of Artificial Sequence: Synthetic peptide
NETPGIRY

SEQ ID NO: 14492 - protein, 10 aa, Artificial Sequence
  Description of Artificial Sequence: Synthetic peptide
REVHNVWATY

SEQ ID NO: 14493 - protein, 11 aa, Artificial Sequence
  Description of Artificial Sequence: Synthetic peptide
MEDDDKEVLKW

SEQ ID NO: 14494 - protein, 10 aa, Artificial Sequence
  Description of Artificial Sequence: Synthetic peptide
EEQAPPLVSL

SEQ ID NO: 14495 - protein, 11 aa, Artificial Sequence
  Description of Artificial Sequence: Synthetic peptide
AEQATQEVKGW

SEQ ID NO: 14496 - protein, 11 aa, Artificial Sequence
  Description of Artificial Sequence: Synthetic peptide
AEQASQEVKGW

SEQ ID NO: 14497 - protein, 9 aa, Artificial Sequence
  Description of Artificial Sequence: Synthetic peptide
AEVKNLTNI

SEQ ID NO: 14498 - protein, 9 aa, Artificial Sequence
  Description of Artificial Sequence: Synthetic peptide
SESAIRNAI

SEQ ID NO: 14499 - protein, 11 aa, Artificial Sequence
  Description of Artificial Sequence: Synthetic peptide
AEQATQEVKNW

SEQ ID NO: 14500 - protein, 11 aa, Artificial Sequence
  Description of Artificial Sequence: Synthetic peptide
AEVKNLTNITI

SEQ ID NO: 14501 - protein, 11 aa, Artificial Sequence
  Description of Artificial Sequence: Synthetic peptide
SEVNIVTDSQY

SEQ ID NO: 14502 - protein, 10 aa, Artificial Sequence
  Description of Artificial Sequence: Synthetic peptide
AETGQETAYF

SEQ ID NO: 14503 - protein, 11 aa, Artificial Sequence
  Description of Artificial Sequence: Synthetic peptide
EEQGEIKNCSF

SEQ ID NO: 14504 - protein, 10 aa, Artificial Sequence
  Description of Artificial Sequence: Synthetic peptide
TETTNQKTEL

SEQ ID NO: 14505 - protein, 9 aa, Artificial Sequence
  Description of Artificial Sequence: Synthetic peptide
SEEMKNCSF

SEQ ID NO: 14506 - protein, 9 aa, Artificial Sequence
  Description of Artificial Sequence: Synthetic peptide
SESEIVNQI

SEQ ID NO: 14507 - protein, 10 aa, Artificial Sequence
  Description of Artificial Sequence: Synthetic peptide
KEQVPPLISL

SEQ ID NO: 14508 - protein, 10 aa, Artificial Sequence
  Description of Artificial Sequence: Synthetic peptide
AETGQEAAYF

SEQ ID NO: 14509 - protein, 11 aa, Artificial Sequence
  Description of Artificial Sequence: Synthetic peptide
SEIVNQIIEQL

SEQ ID NO: 14510 - protein, 11 aa, Artificial Sequence
  Description of Artificial Sequence: Synthetic peptide
AEIQKQGHDQW

SEQ ID NO: 14511 - protein, 10 aa, Artificial Sequence
  Description of Artificial Sequence: Synthetic peptide
KEIDNYTDTI

SEQ ID NO: 14512 - protein, 10 aa, Artificial Sequence
  Description of Artificial Sequence: Synthetic peptide
TEPIIGAETF

SEQ ID NO: 14513 - protein, 11 aa, Artificial Sequence
  Description of Artificial Sequence: Synthetic peptide
AEVQKQGHDQW

SEQ ID NO: 14514 - protein, 11 aa, Artificial Sequence
  Description of Artificial Sequence: Synthetic peptide
AELELAENREI

SEQ ID NO: 14515 - protein, 10 aa, Artificial Sequence
  Description of Artificial Sequence: Synthetic peptide
KEIGNYTDTI

SEQ ID NO: 14516 - protein, 10 aa, Artificial Sequence
  Description of Artificial Sequence: Synthetic peptide
KEIDNYTKTI

SEQ ID NO: 14517 - protein, 11 aa, Artificial Sequence
  Description of Artificial Sequence: Synthetic peptide
AELEMAENREI

SEQ ID NO: 14518 - protein, 10 aa, Artificial Sequence
  Description of Artificial Sequence: Synthetic peptide
AEHLKTAVQM

SEQ ID NO: 14519 - protein, 10 aa, Artificial Sequence
  Description of Artificial Sequence: Synthetic peptide
KEMYPPLTSL

SEQ ID NO: 14520 - protein, 9 aa, Artificial Sequence
  Description of Artificial Sequence: Synthetic peptide
TEMEKEGKI

SEQ ID NO: 14521 - protein, 10 aa, Artificial Sequence
  Description of Artificial Sequence: Synthetic peptide
TEKGVGSPQI

SEQ ID NO: 14522 - protein, 9 aa, Artificial Sequence
  Description of Artificial Sequence: Synthetic peptide
SESELVNQI

SEQ ID NO: 14523 - protein, 10 aa, Artificial Sequence
  Description of Artificial Sequence: Synthetic peptide
SESAIRNAIL

SEQ ID NO: 14524 - protein, 10 aa, Artificial Sequence
  Description of Artificial Sequence: Synthetic peptide
QELKNSAISL

SEQ ID NO: 14525 - protein, 10 aa, Artificial Sequence
  Description of Artificial Sequence: Synthetic peptide
AEGTDRIIEI

SEQ ID NO: 14526 - protein, 10 aa, Artificial Sequence
  Description of Artificial Sequence: Synthetic peptide
TEPIAGAETF

SEQ ID NO: 14527 - protein, 9 aa, Artificial Sequence
  Description of Artificial Sequence: Synthetic peptide
SESAIRKAI

SEQ ID NO: 14528 - protein, 10 aa, Artificial Sequence
  Description of Artificial Sequence: Synthetic peptide
AERQGNVPSL

SEQ ID NO: 14529 - protein, 10 aa, Artificial Sequence
  Description of Artificial Sequence: Synthetic peptide
AERQGTGSSL

SEQ ID NO: 14530 - protein, 10 aa, Artificial Sequence
  Description of Artificial Sequence: Synthetic peptide
EEIKSLYNTV

SEQ ID NO: 14531 - protein, 10 aa, Artificial Sequence
  Description of Artificial Sequence: Synthetic peptide
AERQGTVSSL

SEQ ID NO: 14532 - protein, 10 aa, Artificial Sequence
  Description of Artificial Sequence: Synthetic peptide
SERGVGSPQI

SEQ ID NO: 14533 - protein, 11 aa, Artificial Sequence
  Description of Artificial Sequence: Synthetic peptide
AEGTDRIIEVL

SEQ ID NO: 14534 - protein, 11 aa, Artificial Sequence
  Description of Artificial Sequence: Synthetic peptide
GEEQAPPLVSL

SEQ ID NO: 14535 - protein, 9 aa, Artificial Sequence
  Description of Artificial Sequence: Synthetic peptide
SEGATPQDL

SEQ ID NO: 14536 - protein, 11 aa, Artificial Sequence
  Description of Artificial Sequence: Synthetic peptide
SELVNQIIEQL

SEQ ID NO: 14537 - protein, 10 aa, Artificial Sequence
  Description of Artificial Sequence: Synthetic peptide
TEPILGAETF

SEQ ID NO: 14538 - protein, 10 aa, Artificial Sequence
  Description of Artificial Sequence: Synthetic peptide
LEAQEEEVGF

SEQ ID NO: 14539 - protein, 10 aa, Artificial Sequence
  Description of Artificial Sequence: Synthetic peptide
EELKSLFNTI

SEQ ID NO: 14540 - protein, 10 aa, Artificial Sequence
  Description of Artificial Sequence: Synthetic peptide
SESEIVNQII

SEQ ID NO: 14541 - protein, 10 aa, Artificial Sequence
  Description of Artificial Sequence: Synthetic peptide
AEGTDRVIEI

SEQ ID NO: 14542 - protein, 9 aa, Artificial Sequence
  Description of Artificial Sequence: Synthetic peptide
QEKNEQDLL

SEQ ID NO: 14543 - protein, 9 aa, Artificial Sequence
  Description of Artificial Sequence: Synthetic peptide
GEQDKDRSI

SEQ ID NO: 14544 - protein, 9 aa, Artificial Sequence
  Description of Artificial Sequence: Synthetic peptide
EQAPPLVSL

SEQ ID NO: 14545 - protein, 11 aa, Artificial Sequence
  Description of Artificial Sequence: Synthetic peptide
AEGVGAVSQDL

SEQ ID NO: 14546 - protein, 8 aa, Artificial Sequence
  Description of Artificial Sequence: Synthetic peptide
VEITTHSF

SEQ ID NO: 14547 - protein, 9 aa, Artificial Sequence
  Description of Artificial Sequence: Synthetic peptide
GEQDKTRSV

SEQ ID NO: 14548 - protein, 10 aa, Artificial Sequence
  Description of Artificial Sequence: Synthetic peptide
GDVEITTHSF

SEQ ID NO: 14549 - protein, 11 aa, Artificial Sequence
  Description of Artificial Sequence: Synthetic peptide
REIKNSAIDLL

SEQ ID NO: 14550 - protein, 11 aa, Artificial Sequence
  Description of Artificial Sequence: Synthetic peptide
SENITDNAKTI

SEQ ID NO: 14551 - protein, 8 aa, Artificial Sequence
  Description of Artificial Sequence: Synthetic peptide
TELQAIQL

SEQ ID NO: 14552 - protein, 9 aa, Artificial Sequence
  Description of Artificial Sequence: Synthetic peptide
LEMAENREI

SEQ ID NO: 14553 - protein, 11 aa, Artificial Sequence
  Description of Artificial Sequence: Synthetic peptide
EELAALGEVGL

SEQ ID NO: 14554 - protein, 11 aa, Artificial Sequence
  Description of Artificial Sequence: Synthetic peptide
AEGVGKVSQDL

SEQ ID NO: 14555 - protein, 10 aa, Artificial Sequence
  Description of Artificial Sequence: Synthetic peptide
TERGVGSPQI

SEQ ID NO: 14556 - protein, 8 aa, Artificial Sequence
  Description of Artificial Sequence: Synthetic peptide
SDINGTSL

SEQ ID NO: 14557 - protein, 11 aa, Artificial Sequence
  Description of Artificial Sequence: Synthetic peptide
QELKNSAISLL

SEQ ID NO: 14558 - protein, 9 aa, Artificial Sequence
  Description of Artificial Sequence: Synthetic peptide
EDINLSGKW

SEQ ID NO: 14559 - protein, 9 aa, Artificial Sequence
  Description of Artificial Sequence: Synthetic peptide
QLTEVVQKI

SEQ ID NO: 14560 - protein, 10 aa, Artificial Sequence
  Description of Artificial Sequence: Synthetic peptide
GDLEVTTHSF

SEQ ID NO: 14561 - protein, 9 aa, Artificial Sequence
  Description of Artificial Sequence: Synthetic peptide
TSKGLGISY

SEQ ID NO: 14562 - protein, 9 aa, Artificial Sequence
  Description of Artificial Sequence: Synthetic peptide
VSKGVSQNY

SEQ ID NO: 14563 - protein, 9 aa, Artificial Sequence
  Description of Artificial Sequence: Synthetic peptide
QINNSNTSY

SEQ ID NO: 14564 - protein, 10 aa, Artificial Sequence
  Description of Artificial Sequence: Synthetic peptide
VQINNSNTSY

SEQ ID NO: 14565 - protein, 8 aa, Artificial Sequence
  Description of Artificial Sequence: Synthetic peptide
LIKIATEF

SEQ ID NO: 14566 - protein, 9 aa, Artificial Sequence
  Description of Artificial Sequence: Synthetic peptide
TLKNVSGEF

SEQ ID NO: 14567 - protein, 10 aa, Artificial Sequence
  Description of Artificial Sequence: Synthetic peptide
VPIEKNTTSY

SEQ ID NO: 14568 - protein, 9 aa, Artificial Sequence
  Description of Artificial Sequence: Synthetic peptide
ILRPIGGEM

SEQ ID NO: 14569 - protein, 10 aa, Artificial Sequence
  Description of Artificial Sequence: Synthetic peptide
ILKEPVHGVY

SEQ ID NO: 14570 - protein, 9 aa, Artificial Sequence
  Description of Artificial Sequence: Synthetic peptide
MSKATSTAI

SEQ ID NO: 14571 - protein, 9 aa, Artificial Sequence
  Description of Artificial Sequence: Synthetic peptide
FIPGNINNL

SEQ ID NO: 14572 - protein, 9 aa, Artificial Sequence
  Description of Artificial Sequence: Synthetic peptide
RAVGIGAVF

SEQ ID NO: 14573 - protein, 9 aa, Artificial Sequence
  Description of Artificial Sequence: Synthetic peptide
TLIKIATEF

SEQ ID NO: 14574 - protein, 10 aa, Artificial Sequence
  Description of Artificial Sequence: Synthetic peptide
IIKEPVHGVY

SEQ ID NO: 14575 - protein, 9 aa, Artificial Sequence
  Description of Artificial Sequence: Synthetic peptide
GQKAIGTVL

SEQ ID NO: 14576 - protein, 8 aa, Artificial Sequence
  Description of Artificial Sequence: Synthetic peptide
GQMVHQSL

SEQ ID NO: 14577 - protein, 8 aa, Artificial Sequence
  Description of Artificial Sequence: Synthetic peptide
GQMVHQAL

SEQ ID NO: 14578 - protein, 9 aa, Artificial Sequence
  Description of Artificial Sequence: Synthetic peptide
SQVTATSVL

SEQ ID NO: 14579 - protein, 10 aa, Artificial Sequence
  Description of Artificial Sequence: Synthetic peptide
HQDPVSKQPL

SEQ ID NO: 14580 - protein, 9 aa, Artificial Sequence
  Description of Artificial Sequence: Synthetic peptide
GLYPPLTSL

SEQ ID NO: 14581 - protein, 9 aa, Artificial Sequence
  Description of Artificial Sequence: Synthetic peptide
SLFGSDQSQ

SEQ ID NO: 14582 - protein, 9 aa, Artificial Sequence
  Description of Artificial Sequence: Synthetic peptide
RAVGMGAVL

SEQ ID NO: 14583 - protein, 9 aa, Artificial Sequence
  Description of Artificial Sequence: Synthetic peptide
KAIEAQQHL

SEQ ID NO: 14584 - protein, 10 aa, Artificial Sequence
  Description of Artificial Sequence: Synthetic peptide
HQDPVPKQPL

SEQ ID NO: 14585 - protein, 9 aa, Artificial Sequence
  Description of Artificial Sequence: Synthetic peptide
FIPGNINNL

SEQ ID NO: 14586 - protein, 8 aa, Artificial Sequence
  Description of Artificial Sequence: Synthetic peptide
HQAAMQML

SEQ ID NO: 14587 - protein, 9 aa, Artificial Sequence
  Description of Artificial Sequence: Synthetic peptide
HQAISPRTL

SEQ ID NO: 14588 - protein, 9 aa, Artificial Sequence
  Description of Artificial Sequence: Synthetic peptide
EQAPPLVSL

SEQ ID NO: 14589 - protein, 9 aa, Artificial Sequence
  Description of Artificial Sequence: Synthetic peptide
SQVTSTSIL

SEQ ID NO: 14590 - protein, 9 aa, Artificial Sequence
  Description of Artificial Sequence: Synthetic peptide
KALGPGATL

SEQ ID NO: 14591 - protein, 9 aa, Artificial Sequence
  Description of Artificial Sequence: Synthetic peptide
IKPVVSTQL

SEQ ID NO: 14592 - protein, 10 aa, Artificial Sequence
  Description of Artificial Sequence: Synthetic peptide
IQGQMVHQAL

SEQ ID NO: 14593 - protein, 8 aa, Artificial Sequence
  Description of Artificial Sequence: Synthetic peptide
AQYWGQEL

SEQ ID NO: 14594 - protein, 9 aa, Artificial Sequence
  Description of Artificial Sequence: Synthetic peptide
EQVPPLISL

SEQ ID NO: 14595 - protein, 9 aa, Artificial Sequence
  Description of Artificial Sequence: Synthetic peptide
RAVGIGAVL

SEQ ID NO: 14596 - protein, 8 aa, Artificial Sequence
  Description of Artificial Sequence: Synthetic peptide
GDVEITTH

SEQ ID NO: 14597 - protein, 9 aa, Artificial Sequence
  Description of Artificial Sequence: Synthetic peptide
AEVKNLTNI

SEQ ID NO: 14598 - protein, 9 aa, Artificial Sequence
  Description of Artificial Sequence: Synthetic peptide
GEFFYCNTV

SEQ ID NO: 14599 - protein, 10 aa, Artificial Sequence
  Description of Artificial Sequence: Synthetic peptide
KEIDNYTDTI

SEQ ID NO: 14600 - protein, 9 aa, Artificial Sequence
  Description of Artificial Sequence: Synthetic peptide
GEIQCTSNI

SEQ ID NO: 14601 - protein, 9 aa, Artificial Sequence
  Description of Artificial Sequence: Synthetic peptide
SESEIVNQI

SEQ ID NO: 14602 - protein, 9 aa, Artificial Sequence
  Description of Artificial Sequence: Synthetic peptide
SESELVNQI

SEQ ID NO: 14603 - protein, 9 aa, Artificial Sequence
  Description of Artificial Sequence: Synthetic peptide
SESAIRNAI

SEQ ID NO: 14604 - protein, 10 aa, Artificial Sequence
  Description of Artificial Sequence: Synthetic peptide
KEIDNYTKTI

SEQ ID NO: 14605 - protein, 10 aa, Artificial Sequence
  Description of Artificial Sequence: Synthetic peptide
KEIGNYTDTI

SEQ ID NO: 14606 - protein, 9 aa, Artificial Sequence
  Description of Artificial Sequence: Synthetic peptide
TEMEKEGKI

SEQ ID NO: 14607 - protein, 9 aa, Artificial Sequence
  Description of Artificial Sequence: Synthetic peptide
LENDSKLVI

SEQ ID NO: 14608 - protein, 11 aa, Artificial Sequence
  Description of Artificial Sequence: Synthetic peptide
AEVKNLTNITI

SEQ ID NO: 14609 - protein, 10 aa, Artificial Sequence
  Description of Artificial Sequence: Synthetic peptide
KEISNYTGTI

SEQ ID NO: 14610 - protein, 9 aa, Artificial Sequence
  Description of Artificial Sequence: Synthetic peptide
LEDDSKLVI

SEQ ID NO: 14611 - protein, 10 aa, Artificial Sequence
  Description of Artificial Sequence: Synthetic peptide
AENFGFGEGI

SEQ ID NO: 14612 - protein, 9 aa, Artificial Sequence
  Description of Artificial Sequence: Synthetic peptide
LEMAENREI

SEQ ID NO: 14613 - protein, 8 aa, Artificial Sequence
  Description of Artificial Sequence: Synthetic peptide
DEALLTAV

SEQ ID NO: 14614 - protein, 10 aa, Artificial Sequence
  Description of Artificial Sequence: Synthetic peptide
EEIKSLYNTV

SEQ ID NO: 14615 - protein, 9 aa, Artificial Sequence
  Description of Artificial Sequence: Synthetic peptide
KEFNGTGLC

SEQ ID NO: 14616 - protein, 10 aa, Artificial Sequence
  Description of Artificial Sequence: Synthetic peptide
TERGVGSPQI

SEQ ID NO: 14617 - protein, 10 aa, Artificial Sequence
  Description of Artificial Sequence: Synthetic peptide
TEKGVGSPQI

SEQ ID NO: 14618 - protein, 10 aa, Artificial Sequence
  Description of Artificial Sequence: Synthetic peptide
SERGVGSPQI

SEQ ID NO: 14619 - protein, 8 aa, Artificial Sequence
  Description of Artificial Sequence: Synthetic peptide
GEAIHGQV

SEQ ID NO: 14620 - protein, 10 aa, Artificial Sequence
  Description of Artificial Sequence: Synthetic peptide
EELKSLFNTI

SEQ ID NO: 14621 - protein, 8 aa, Artificial Sequence
  Description of Artificial Sequence: Synthetic peptide
SEIVNQII

SEQ ID NO: 14622 - protein, 8 aa, Artificial Sequence
  Description of Artificial Sequence: Synthetic peptide
YEKEAHNV

SEQ ID NO: 14623 - protein, 8 aa, Artificial Sequence
  Description of Artificial Sequence: Synthetic peptide
YEREVHNV

SEQ ID NO: 14624 - protein, 11 aa, Artificial Sequence
  Description of Artificial Sequence: Synthetic peptide
AELELAENREI

SEQ ID NO: 14625 - protein, 9 aa, Artificial Sequence
  Description of Artificial Sequence: Synthetic peptide
GEQDKTRSV

SEQ ID NO: 14626 - protein, 10 aa, Artificial Sequence
  Description of Artificial Sequence: Synthetic peptide
GEFFYCNTTI

SEQ ID NO: 14627 - protein, 9 aa, Artificial Sequence
  Description of Artificial Sequence: Synthetic peptide
IEICGQKAI

SEQ ID NO: 14628 - protein, 10 aa, Artificial Sequence
  Description of Artificial Sequence: Synthetic peptide
AEGFGFGEEI

SEQ ID NO: 14629 - protein, 10 aa, Artificial Sequence
  Description of Artificial Sequence: Synthetic peptide
EEQAPPLVSL

SEQ ID NO: 14630 - protein, 9 aa, Artificial Sequence
  Description of Artificial Sequence: Synthetic peptide
LEEDSKLVI

SEQ ID NO: 14631 - protein, 9 aa, Artificial Sequence
  Description of Artificial Sequence: Synthetic peptide
GEEQAPPLV

SEQ ID NO: 14632 - protein, 10 aa, Artificial Sequence
  Description of Artificial Sequence: Synthetic peptide
AESFGFGEEI

SEQ ID NO: 14633 - protein, 9 aa, Artificial Sequence
  Description of Artificial Sequence: Synthetic peptide
SESAIRKAI

SEQ ID NO: 14634 - protein, 10 aa, Artificial Sequence
  Description of Artificial Sequence: Synthetic peptide
GEIIGDIRKA

SEQ ID NO: 14635 - protein, 9 aa, Artificial Sequence
  Description of Artificial Sequence: Synthetic peptide
AEAMSQVTA

SEQ ID NO: 14636 - protein, 9 aa, Artificial Sequence
  Description of Artificial Sequence: Synthetic peptide
SEIHQNPVP

SEQ ID NO: 14637 - protein, 10 aa, Artificial Sequence
  Description of Artificial Sequence: Synthetic peptide
GEIIGDTRKA

SEQ ID NO: 14638 - protein, 10 aa, Artificial Sequence
  Description of Artificial Sequence: Synthetic peptide
GEIIGDIRKA

SEQ ID NO: 14639 - protein, 9 aa, Artificial Sequence
  Description of Artificial Sequence: Synthetic peptide
LETEPIAGA

SEQ ID NO: 14640 - protein, 9 aa, Artificial Sequence
  Description of Artificial Sequence: Synthetic peptide
LETEPIIGA

SEQ ID NO: 14641 - protein, 9 aa, Artificial Sequence
  Description of Artificial Sequence: Synthetic peptide
IEVRDTKEA

SEQ ID NO: 14642 - protein, 9 aa, Artificial Sequence
  Description of Artificial Sequence: Synthetic peptide
AETFYVDGA

SEQ ID NO: 14643 - protein, 9 aa, Artificial Sequence
  Description of Artificial Sequence: Synthetic peptide
FIPGNINNL

SEQ ID NO: 14644 - protein, 9 aa, Artificial Sequence
  Description of Artificial Sequence: Synthetic peptide
LETEPILGA

SEQ ID NO: 14645 - protein, 11 aa, Artificial Sequence
  Description of Artificial Sequence: Synthetic peptide
AEAMSKATGAA

SEQ ID NO: 14646 - protein, 9 aa, Artificial Sequence
  Description of Artificial Sequence: Synthetic peptide
FIPGDINNL

SEQ ID NO: 14647 - protein, 9 aa, Artificial Sequence
  Description of Artificial Sequence: Synthetic peptide
LIPGDINNL

SEQ ID NO: 14648 - protein, 9 aa, Artificial Sequence
  Description of Artificial Sequence: Synthetic peptide
TINGTLWNA

SEQ ID NO: 14649 - protein, 9 aa, Artificial Sequence
  Description of Artificial Sequence: Synthetic peptide
KEFNGTGLC

SEQ ID NO: 14650 - protein, 9 aa, Artificial Sequence
  Description of Artificial Sequence: Synthetic peptide
RVIEILQRA

SEQ ID NO: 14651 - protein, 9 aa, Artificial Sequence
  Description of Artificial Sequence: Synthetic peptide
ASITLTVQA

SEQ ID NO: 14652 - protein, 11 aa, Artificial Sequence
  Description of Artificial Sequence: Synthetic peptide
AEAMSKATSTA

SEQ ID NO: 14653 - protein, 9 aa, Artificial Sequence
  Description of Artificial Sequence: Synthetic peptide
TETLLVQNA

SEQ ID NO: 14654 - protein, 9 aa, Artificial Sequence
  Description of Artificial Sequence: Synthetic peptide
AVFLGFLGA

SEQ ID NO: 14655 - protein, 11 aa, Artificial Sequence
  Description of Artificial Sequence: Synthetic peptide
TQVDPDLADQL

SEQ ID NO: 14656 - protein, 10 aa, Artificial Sequence
  Description of Artificial Sequence: Synthetic peptide
AETFYVDGAA

SEQ ID NO: 14657 - protein, 9 aa, Artificial Sequence
  Description of Artificial Sequence: Synthetic peptide
ATLEEMMTA

SEQ ID NO: 14658 - protein, 8 aa, Artificial Sequence
  Description of Artificial Sequence: Synthetic peptide
TEVVQKVA

SEQ ID NO: 14659 - protein, 9 aa, Artificial Sequence
  Description of Artificial Sequence: Synthetic peptide
AMFLGFLGA

SEQ ID NO: 14660 - protein, 9 aa, Artificial Sequence
  Description of Artificial Sequence: Synthetic peptide
TIYRLIESA

SEQ ID NO: 14661 - protein, 9 aa, Artificial Sequence
  Description of Artificial Sequence: Synthetic peptide
GEFFYCNTV

SEQ ID NO: 14662 - protein, 9 aa, Artificial Sequence
  Description of Artificial Sequence: Synthetic peptide
ILAEAMSKA

SEQ ID NO: 14663 - protein, 9 aa, Artificial Sequence
  Description of Artificial Sequence: Synthetic peptide
VVAEGTDRV

SEQ ID NO: 14664 - protein, 9 aa, Artificial Sequence
  Description of Artificial Sequence: Synthetic peptide
TIYRLIEEA

SEQ ID NO: 14665 - protein, 10 aa, Artificial Sequence
  Description of Artificial Sequence: Synthetic peptide
AVFLGFLGAA

SEQ ID NO: 14666 - protein, 9 aa, Artificial Sequence
  Description of Artificial Sequence: Synthetic peptide
AAITLTAQA

SEQ ID NO: 14667 - protein, 9 aa, Artificial Sequence
  Description of Artificial Sequence: Synthetic peptide
VVIQDNNEI

SEQ ID NO: 14668 - protein, 9 aa, Artificial Sequence
  Description of Artificial Sequence: Synthetic peptide
ASMTLTVQA

SEQ ID NO: 14669 - protein, 9 aa, Artificial Sequence
  Description of Artificial Sequence: Synthetic peptide
RENDTITLP

SEQ ID NO: 14670 - protein, 9 aa, Artificial Sequence
  Description of Artificial Sequence: Synthetic peptide
RIIEILQRA

SEQ ID NO: 14671 - protein, 9 aa, Artificial Sequence
  Description of Artificial Sequence: Synthetic peptide
QLTEVVQKV

SEQ ID NO: 14672 - protein, 9 aa, Artificial Sequence
  Description of Artificial Sequence: Synthetic peptide
EEVGFPVRP

SEQ ID NO: 14673 - protein, 11 aa, Artificial Sequence
  Description of Artificial Sequence: Synthetic peptide
ALFNATNMTNA

SEQ ID NO: 14674 - protein, 9 aa, Artificial Sequence
  Description of Artificial Sequence: Synthetic peptide
VVAEGTDRI

SEQ ID NO: 14675 - protein, 11 aa, Artificial Sequence
  Description of Artificial Sequence: Synthetic peptide
AEWDRLHPVQA

SEQ ID NO: 14676 - protein, 8 aa, Artificial Sequence
  Description of Artificial Sequence: Synthetic peptide
TAFTIPSI

SEQ ID NO: 14677 - protein, 9 aa, Artificial Sequence
  Description of Artificial Sequence: Synthetic peptide
FPISPIETV

SEQ ID NO: 14678 - protein, 9 aa, Artificial Sequence
  Description of Artificial Sequence: Synthetic peptide
FPISSIETV

SEQ ID NO: 14679 - protein, 9 aa, Artificial Sequence
  Description of Artificial Sequence: Synthetic peptide
YAAPIAGQI

SEQ ID NO: 14680 - protein, 9 aa, Artificial Sequence
  Description of Artificial Sequence: Synthetic peptide
DAKAYEREI

SEQ ID NO: 14681 - protein, 9 aa, Artificial Sequence
  Description of Artificial Sequence: Synthetic peptide
LPNKSSWTV

SEQ ID NO: 14682 - protein, 9 aa, Artificial Sequence
  Description of Artificial Sequence: Synthetic peptide
DAKAYDPEV

SEQ ID NO: 14683 - protein, 10 aa, Artificial Sequence
  Description of Artificial Sequence: Synthetic peptide
IPYNPQSQGV

SEQ ID NO: 14684 - protein, 9 aa, Artificial Sequence
  Description of Artificial Sequence: Synthetic peptide
LPPLERLTI

SEQ ID NO: 14685 - protein, 9 aa, Artificial Sequence
  Description of Artificial Sequence: Synthetic peptide
TALVTPKKV

SEQ ID NO: 14686 - protein, 8 aa, Artificial Sequence
  Description of Artificial Sequence: Synthetic peptide
IPGNINNL

SEQ ID NO: 14687 - protein, 8 aa, Artificial Sequence
  Description of Artificial Sequence: Synthetic peptide
AAPIAGQI

SEQ ID NO: 14688 - protein, 9 aa, Artificial Sequence
  Description of Artificial Sequence: Synthetic peptide
DAKAYEREV

SEQ ID NO: 14689 - protein, 9 aa, Artificial Sequence
  Description of Artificial Sequence: Synthetic peptide
LPPVVAKEI

SEQ ID NO: 14690 - protein, 9 aa, Artificial Sequence
  Description of Artificial Sequence: Synthetic peptide
VAYIVAILI

SEQ ID NO: 14691 - protein, 11 aa, Artificial Sequence
  Description of Artificial Sequence: Synthetic peptide
IPLENDSKLVI

SEQ ID NO: 14692 - protein, 9 aa, Artificial Sequence
  Description of Artificial Sequence: Synthetic peptide
LPPIVAKEI

SEQ ID NO: 14693 - protein, 8 aa, Artificial Sequence
  Description of Artificial Sequence: Synthetic peptide
HAALGSGI

SEQ ID NO: 14694 - protein, 8 aa, Artificial Sequence
  Description of Artificial Sequence: Synthetic peptide
NPYNTPVF

SEQ ID NO: 14695 - protein, 9 aa, Artificial Sequence
  Description of Artificial Sequence: Synthetic peptide
VPSLDFPQI

SEQ ID NO: 14696 - protein, 9 aa, Artificial Sequence
  Description of Artificial Sequence: Synthetic peptide
NPPVPVGEI

SEQ ID NO: 14697 - protein, 9 aa, Artificial Sequence
  Description of Artificial Sequence: Synthetic peptide
DSSLALRHV

SEQ ID NO: 14698 - protein, 8 aa, Artificial Sequence
  Description of Artificial Sequence: Synthetic peptide
TAVRTIKI

SEQ ID NO: 14699 - protein, 8 aa, Artificial Sequence
  Description of Artificial Sequence: Synthetic peptide
APPIAGKI

SEQ ID NO: 14700 - protein, 9 aa, Artificial Sequence
  Description of Artificial Sequence: Synthetic peptide
YAPPIAGKI

SEQ ID NO: 14701 - protein, 10 aa, Artificial Sequence
  Description of Artificial Sequence: Synthetic peptide
VPYNPQSQGV

SEQ ID NO: 14702 - protein, 8 aa, Artificial Sequence
  Description of Artificial Sequence: Synthetic peptide
TAYFILKL

SEQ ID NO: 14703 - protein, 9 aa, Artificial Sequence
  Description of Artificial Sequence: Synthetic peptide
SPLSLQTLI

SEQ ID NO: 14704 - protein, 8 aa, Artificial Sequence
  Description of Artificial Sequence: Synthetic peptide
IATEGIVI

SEQ ID NO: 14705 - protein, 8 aa, Artificial Sequence
  Description of Artificial Sequence: Synthetic peptide
VAFIVALI

SEQ ID NO: 14706 - protein, 11 aa, Artificial Sequence
  Description of Artificial Sequence: Synthetic peptide
IPYNPQSQGVV

SEQ ID NO: 14707 - protein, 8 aa, Artificial Sequence
  Description of Artificial Sequence: Synthetic peptide
SPVSILDI

SEQ ID NO: 14708 - protein, 8 aa, Artificial Sequence
  Description of Artificial Sequence: Synthetic peptide
VPVEPEEV

SEQ ID NO: 14709 - protein, 9 aa, Artificial Sequence
  Description of Artificial Sequence: Synthetic peptide
FPISPIETV

SEQ ID NO: 14710 - protein, 9 aa, Artificial Sequence
  Description of Artificial Sequence: Synthetic peptide
FPISSIETV

SEQ ID NO: 14711 - protein, 11 aa, Artificial Sequence
  Description of Artificial Sequence: Synthetic peptide
MPSLLAVGISA

SEQ ID NO: 14712 - protein, 9 aa, Artificial Sequence
  Description of Artificial Sequence: Synthetic peptide
VPKQPLPQA

SEQ ID NO: 14713 - protein, 9 aa, Artificial Sequence
  Description of Artificial Sequence: Synthetic peptide
LPNKSSWTV

SEQ ID NO: 14714 - protein, 10 aa, Artificial Sequence
  Description of Artificial Sequence: Synthetic peptide
YPKPEGTRTA

SEQ ID NO: 14715 - protein, 9 aa, Artificial Sequence
  Description of Artificial Sequence: Synthetic peptide
NATLNRVAA

SEQ ID NO: 14716 - protein, 9 aa, Artificial Sequence
  Description of Artificial Sequence: Synthetic peptide
HVASGYIEA

SEQ ID NO: 14717 - protein, 9 aa, Artificial Sequence
  Description of Artificial Sequence: Synthetic peptide
IPAETGQEA

SEQ ID NO: 14718 - protein, 10 aa, Artificial Sequence
  Description of Artificial Sequence: Synthetic peptide
TPAAAPGVGA

SEQ ID NO: 14719 - protein, 10 aa, Artificial Sequence
  Description of Artificial Sequence: Synthetic peptide
EPLGVAPTKA

SEQ ID NO: 14720 - protein, 9 aa, Artificial Sequence
  Description of Artificial Sequence: Synthetic peptide
APIAGQIQC

SEQ ID NO: 14721 - protein, 10 aa, Artificial Sequence
  Description of Artificial Sequence: Synthetic peptide
YPKPEGTRQA

SEQ ID NO: 14722 - protein, 9 aa, Artificial Sequence
  Description of Artificial Sequence: Synthetic peptide
NPYNTPVFA

SEQ ID NO: 14723 - protein, 9 aa, Artificial Sequence
  Description of Artificial Sequence: Synthetic peptide
DPIPIYYCA

SEQ ID NO: 14724 - protein, 9 aa, Artificial Sequence
  Description of Artificial Sequence: Synthetic peptide
TIYRLIESA

SEQ ID NO: 14725 - protein, 10 aa, Artificial Sequence
  Description of Artificial Sequence: Synthetic peptide
QPLGIAPSRA

SEQ ID NO: 14726 - protein, 10 aa, Artificial Sequence
  Description of Artificial Sequence: Synthetic peptide
EPVGVAPTKA

SEQ ID NO: 14727 - protein, 8 aa, Artificial Sequence
  Description of Artificial Sequence: Synthetic peptide
TAFTIPSI

SEQ ID NO: 14728 - protein, 9 aa, Artificial Sequence
  Description of Artificial Sequence: Synthetic peptide
DPIPIHYCA

SEQ ID NO: 14729 - protein, 9 aa, Artificial Sequence
  Description of Artificial Sequence: Synthetic peptide
YPIVQNIQG

SEQ ID NO: 14730 - protein, 11 aa, Artificial Sequence
  Description of Artificial Sequence: Synthetic peptide
LPPVVAKEIVA

SEQ ID NO: 14731 - protein, 9 aa, Artificial Sequence
  Description of Artificial Sequence: Synthetic peptide
HPDKWTVQA

SEQ ID NO: 14732 - protein, 11 aa, Artificial Sequence
  Description of Artificial Sequence: Synthetic peptide
FPISPIETVPV

SEQ ID NO: 14733 - protein, 10 aa, Artificial Sequence
  Description of Artificial Sequence: Synthetic peptide
VPIEICGQKA

SEQ ID NO: 14734 - protein, 11 aa, Artificial Sequence
  Description of Artificial Sequence: Synthetic peptide
VPVDPEEIEKA

SEQ ID NO: 14735 - protein, 11 aa, Artificial Sequence
  Description of Artificial Sequence: Synthetic peptide
NPVPKQPLPQA

SEQ ID NO: 14736 - protein, 11 aa, Artificial Sequence
  Description of Artificial Sequence: Synthetic peptide
MLNTVGGHQAA

SEQ ID NO: 14737 - protein, 9 aa, Artificial Sequence
  Description of Artificial Sequence: Synthetic peptide
DVVPLTVEA

SEQ ID NO: 14738 - protein, 9 aa, Artificial Sequence
  Description of Artificial Sequence: Synthetic peptide
TIYRLIEEA

SEQ ID NO: 14739 - protein, 9 aa, Artificial Sequence
  Description of Artificial Sequence: Synthetic peptide
EATTTLFCA

SEQ ID NO: 14740 - protein, 10 aa, Artificial Sequence
  Description of Artificial Sequence: Synthetic peptide
IPIEICGQKA

SEQ ID NO: 14741 - protein, 9 aa, Artificial Sequence
  Description of Artificial Sequence: Synthetic peptide
HPVHAGPIP

SEQ ID NO: 14742 - protein, 11 aa, Artificial Sequence
  Description of Artificial Sequence: Synthetic peptide
FPISSIETVPV

SEQ ID NO: 14743 - protein, 9 aa, Artificial Sequence
  Description of Artificial Sequence: Synthetic peptide
AAITLTAQA

SEQ ID NO: 14744 - protein, 10 aa, Artificial Sequence
  Description of Artificial Sequence: Synthetic peptide
HPVHAGPIPP

SEQ ID NO: 14745 - protein, 9 aa, Artificial Sequence
  Description of Artificial Sequence: Synthetic peptide
YPILQNLQG

SEQ ID NO: 14746 - protein, 9 aa, Artificial Sequence
  Description of Artificial Sequence: Synthetic peptide
VPKQPLPQA

SEQ ID NO: 14747 - protein, 10 aa, Artificial Sequence
  Description of Artificial Sequence: Synthetic peptide
YPKPEGTRTA

SEQ ID NO: 14748 - protein, 9 aa, Artificial Sequence
  Description of Artificial Sequence: Synthetic peptide
APIAGQIQC

SEQ ID NO: 14749 - protein, 10 aa, Artificial Sequence
  Description of Artificial Sequence: Synthetic peptide
YPKPEGTRQA

SEQ ID NO: 14750 - protein, 9 aa, Artificial Sequence
  Description of Artificial Sequence: Synthetic peptide
VPKQPLSQT

SEQ ID NO: 14751 - protein, 9 aa, Artificial Sequence
  Description of Artificial Sequence: Synthetic peptide
FPISPIETV

SEQ ID NO: 14752 - protein, 9 aa, Artificial Sequence
  Description of Artificial Sequence: Synthetic peptide
KVKPPLPSV

SEQ ID NO: 14753 - protein, 9 aa, Artificial Sequence
  Description of Artificial Sequence: Synthetic peptide
RPEPTAPPA

SEQ ID NO: 14754 - protein, 9 aa, Artificial Sequence
  Description of Artificial Sequence: Synthetic peptide
FPISSIETV

SEQ ID NO: 14755 - protein, 9 aa, Artificial Sequence
  Description of Artificial Sequence: Synthetic peptide
IPAETGQEA

SEQ ID NO: 14756 - protein, 10 aa, Artificial Sequence
  Description of Artificial Sequence: Synthetic peptide
TPAAAPGVGA

SEQ ID NO: 14757 - protein, 9 aa, Artificial Sequence
  Description of Artificial Sequence: Synthetic peptide
APIAGQIQC

SEQ ID NO: 14758 - protein, 9 aa, Artificial Sequence
  Description of Artificial Sequence: Synthetic peptide
VPKQPLPQA

SEQ ID NO: 14759 - protein, 10 aa, Artificial Sequence
  Description of Artificial Sequence: Synthetic peptide
TPAAAPGVGA

SEQ ID NO: 14760 - protein, 9 aa, Artificial Sequence
  Description of Artificial Sequence: Synthetic peptide
FPISPIETV

SEQ ID NO: 14761 - protein, 9 aa, Artificial Sequence
  Description of Artificial Sequence: Synthetic peptide
FPISSIETV

SEQ ID NO: 14762 - protein, 11 aa, Artificial Sequence
  Description of Artificial Sequence: Synthetic peptide
MPSLLAVGISA

SEQ ID NO: 14763 - protein, 9 aa, Artificial Sequence
  Description of Artificial Sequence: Synthetic peptide
IPAETGQEA

SEQ ID NO: 14764 - protein, 10 aa, Artificial Sequence
  Description of Artificial Sequence: Synthetic peptide
IPAETGQEAA

SEQ ID NO: 14765 - protein, 10 aa, Artificial Sequence
  Description of Artificial Sequence: Synthetic peptide
VPIEICGQKA

SEQ ID NO: 14766 - protein, 10 aa, Artificial Sequence
  Description of Artificial Sequence: Synthetic peptide
QPLGIAPSRA

SEQ ID NO: 14767 - protein, 10 aa, Artificial Sequence
  Description of Artificial Sequence: Synthetic peptide
IPAETGQETA

SEQ ID NO: 14768 - protein, 9 aa, Artificial Sequence
  Description of Artificial Sequence: Synthetic peptide
NPYNTPVFA

SEQ ID NO: 14769 - protein, 9 aa, Artificial Sequence
  Description of Artificial Sequence: Synthetic peptide
RPEPTAPPA

SEQ ID NO: 14770 - protein, 10 aa, Artificial Sequence
  Description of Artificial Sequence: Synthetic peptide
EPVGVAPTKA

SEQ ID NO: 14771 - protein, 10 aa, Artificial Sequence
  Description of Artificial Sequence: Synthetic peptide
YPKPEGTRTA

SEQ ID NO: 14772 - protein, 10 aa, Artificial Sequence
  Description of Artificial Sequence: Synthetic peptide
IPIEICGQKA

SEQ ID NO: 14773 - protein, 10 aa, Artificial Sequence
  Description of Artificial Sequence: Synthetic peptide
EPLGVAPTKA

SEQ ID NO: 14774 - protein, 10 aa, Artificial Sequence
  Description of Artificial Sequence: Synthetic peptide
RPVVTIKVEG

SEQ ID NO: 14775 - protein, 10 aa, Artificial Sequence
  Description of Artificial Sequence: Synthetic peptide
YPKPEGTRQA

SEQ ID NO: 14776 - protein, 9 aa, Artificial Sequence
  Description of Artificial Sequence: Synthetic peptide
LPNKSSWTV

SEQ ID NO: 14777 - protein, 10 aa, Artificial Sequence
  Description of Artificial Sequence: Synthetic peptide
IPYNPQSQGV

SEQ ID NO: 14778 - protein, 9 aa, Artificial Sequence
  Description of Artificial Sequence: Synthetic peptide
APIAGQIQC

SEQ ID NO: 14779 - protein, 9 aa, Artificial Sequence
  Description of Artificial Sequence: Synthetic peptide
VPKQPLPQA

SEQ ID NO: 14780 - protein, 9 aa, Artificial Sequence
  Description of Artificial Sequence: Synthetic peptide
FPISPIETV

SEQ ID NO: 14781 - protein, 9 aa, Artificial Sequence
  Description of Artificial Sequence: Synthetic peptide
FPISSIETV

SEQ ID NO: 14782 - protein, 10 aa, Artificial Sequence
  Description of Artificial Sequence: Synthetic peptide
TPAAAPGVGA

SEQ ID NO: 14783 - protein, 9 aa, Artificial Sequence
  Description of Artificial Sequence: Synthetic peptide
IPAETGQEA

SEQ ID NO: 14784 - protein, 10 aa, Artificial Sequence
  Description of Artificial Sequence: Synthetic peptide
RPVVTIKVEG

SEQ ID NO: 14785 - protein, 10 aa, Artificial Sequence
  Description of Artificial Sequence: Synthetic peptide
VPIEICGQKA

SEQ ID NO: 14786 - protein, 10 aa, Artificial Sequence
  Description of Artificial Sequence: Synthetic peptide
QPLGIAPSRA

SEQ ID NO: 14787 - protein, 11 aa, Artificial Sequence
  Description of Artificial Sequence: Synthetic peptide
MPSLLAVGISA

SEQ ID NO: 14788 - protein, 10 aa, Artificial Sequence
  Description of Artificial Sequence: Synthetic peptide
IPYNPQSQGV

SEQ ID NO: 14789 - protein, 9 aa, Artificial Sequence
  Description of Artificial Sequence: Synthetic peptide
LPNKSSWTV

SEQ ID NO: 14790 - protein, 10 aa, Artificial Sequence
  Description of Artificial Sequence: Synthetic peptide
YPKPEGTRTA

SEQ ID NO: 14791 - protein, 10 aa, Artificial Sequence
  Description of Artificial Sequence: Synthetic peptide
APAGFAILKC

SEQ ID NO: 14792 - protein, 10 aa, Artificial Sequence
  Description of Artificial Sequence: Synthetic peptide
IPAETGQEAA

SEQ ID NO: 14793 - protein, 10 aa, Artificial Sequence
  Description of Artificial Sequence: Synthetic peptide
VPYNPQSQGV

SEQ ID NO: 14794 - protein, 10 aa, Artificial Sequence
  Description of Artificial Sequence: Synthetic peptide
RPVVTIKVGG

SEQ ID NO: 14795 - protein, 10 aa, Artificial Sequence
  Description of Artificial Sequence: Synthetic peptide
RPLVTIKVEG

SEQ ID NO: 14796 - protein, 10 aa, Artificial Sequence
  Description of Artificial Sequence: Synthetic peptide
IPAETGQETA

SEQ ID NO: 14797 - protein, 10 aa, Artificial Sequence
  Description of Artificial Sequence: Synthetic peptide
YPKPEGTRQA

SEQ ID NO: 14798 - protein, 9 aa, Artificial Sequence
  Description of Artificial Sequence: Synthetic peptide
RPEPTAPPA

SEQ ID NO: 14799 - protein, 10 aa, Artificial Sequence
  Description of Artificial Sequence: Synthetic peptide
SPEVIPMFSA

SEQ ID NO: 14800 - protein, 10 aa, Artificial Sequence
  Description of Artificial Sequence: Synthetic peptide
IPIEICGQKA

SEQ ID NO: 14801 - protein, 10 aa, Artificial Sequence
  Description of Artificial Sequence: Synthetic peptide
APAGYAILKC

SEQ ID NO: 14802 - protein, 9 aa, Artificial Sequence
  Description of Artificial Sequence: Synthetic peptide
NPYPKPEGT

SEQ ID NO: 14803 - protein, 11 aa, Artificial Sequence
  Description of Artificial Sequence: Synthetic peptide
KAYDPEVHNVW

SEQ ID NO: 14804 - protein, 9 aa, Artificial Sequence
  Description of Artificial Sequence: Synthetic peptide
LSFPQITLW

SEQ ID NO: 14805 - protein, 9 aa, Artificial Sequence
  Description of Artificial Sequence: Synthetic peptide
STLQEQITW

SEQ ID NO: 14806 - protein, 9 aa, Artificial Sequence
  Description of Artificial Sequence: Synthetic peptide
NTKTIIVQF

SEQ ID NO: 14807 - protein, 9 aa, Artificial Sequence
  Description of Artificial Sequence: Synthetic peptide
TTVPWNLSW

SEQ ID NO: 14808 - protein, 11 aa, Artificial Sequence
  Description of Artificial Sequence: Synthetic peptide
KAYEREIHNVW

SEQ ID NO: 14809 - protein, 11 aa, Artificial Sequence
  Description of Artificial Sequence: Synthetic peptide
RTVNKGLIRGW

SEQ ID NO: 14810 - protein, 11 aa, Artificial Sequence
  Description of Artificial Sequence: Synthetic peptide
KAYEREVHNVW

SEQ ID NO: 14811 - protein, 9 aa, Artificial Sequence
  Description of Artificial Sequence: Synthetic peptide
NTKNIIVQF

SEQ ID NO: 14812 - protein, 9 aa, Artificial Sequence
  Description of Artificial Sequence: Synthetic peptide
RIKQIVNVW

SEQ ID NO: 14813 - protein, 11 aa, Artificial Sequence
  Description of Artificial Sequence: Synthetic peptide
KAYEKEAHNVW

SEQ ID NO: 14814 - protein, 10 aa, Artificial Sequence
  Description of Artificial Sequence: Synthetic peptide
KVATEGIVIW

SEQ ID NO: 14815 - protein, 9 aa, Artificial Sequence
  Description of Artificial Sequence: Synthetic peptide
VSGFLPLTW

SEQ ID NO: 14816 - protein, 10 aa, Artificial Sequence
  Description of Artificial Sequence: Synthetic peptide
TVNKGLIRGW

SEQ ID NO: 14817 - protein, 11 aa, Artificial Sequence
  Description of Artificial Sequence: Synthetic peptide
KSIRIGPGQVF

SEQ ID NO: 14818 - protein, 9 aa, Artificial Sequence
  Description of Artificial Sequence: Synthetic peptide
RIKQIVNMW

SEQ ID NO: 14819 - protein, 10 aa, Artificial Sequence
  Description of Artificial Sequence: Synthetic peptide
TTNVPWNSSW

SEQ ID NO: 14820 - protein, 10 aa, Artificial Sequence
  Description of Artificial Sequence: Synthetic peptide
KIATEGIVIW

SEQ ID NO: 14821 - protein, 9 aa, Artificial Sequence
  Description of Artificial Sequence: Synthetic peptide
LAFQQREAW

SEQ ID NO: 14822 - protein, 9 aa, Artificial Sequence
  Description of Artificial Sequence: Synthetic peptide
VSKGVSQNY

SEQ ID NO: 14823 - protein, 10 aa, Artificial Sequence
  Description of Artificial Sequence: Synthetic peptide
TTNVRWNSSW

SEQ ID NO: 14824 - protein, 11 aa, Artificial Sequence
  Description of Artificial Sequence: Synthetic peptide
TTSTLQEQITW

SEQ ID NO: 14825 - protein, 10 aa, Artificial Sequence
  Description of Artificial Sequence: Synthetic peptide
KYLGNLAQYW

SEQ ID NO: 14826 - protein, 9 aa, Artificial Sequence
  Description of Artificial Sequence: Synthetic peptide
IQLPNKSSW

SEQ ID NO: 14827 - protein, 9 aa, Artificial Sequence
  Description of Artificial Sequence: Synthetic peptide
RIRQFVNMW

SEQ ID NO: 14828 - protein, 9 aa, Artificial Sequence
  Description of Artificial Sequence: Synthetic peptide
RVREMQRNW

SEQ ID NO: 14829 - protein, 9 aa, Artificial Sequence
  Description of Artificial Sequence: Synthetic peptide
STLQEQIAW

SEQ ID NO: 14830 - protein, 9 aa, Artificial Sequence
  Description of Artificial Sequence: Synthetic peptide
IQLPDKSSW

SEQ ID NO: 14831 - protein, 9 aa, Artificial Sequence
  Description of Artificial Sequence: Synthetic peptide
RIRQIVNMW

SEQ ID NO: 14832 - protein, 10 aa, Artificial Sequence
  Description of Artificial Sequence: Synthetic peptide
KIATESIVIW

SEQ ID NO: 14833 - protein, 11 aa, Artificial Sequence
  Description of Artificial Sequence: Synthetic peptide
RTVDRGVKGGW

SEQ ID NO: 14834 - protein, 9 aa, Artificial Sequence
  Description of Artificial Sequence: Synthetic peptide
LAFQQGEAW

SEQ ID NO: 14835 - protein, 10 aa, Artificial Sequence
  Description of Artificial Sequence: Synthetic peptide
KAIEAQQHLL

SEQ ID NO: 14836 - protein, 10 aa, Artificial Sequence
  Description of Artificial Sequence: Synthetic peptide
LVSGFLPLTW

SEQ ID NO: 14837 - protein, 10 aa, Artificial Sequence
  Description of Artificial Sequence: Synthetic peptide
VTVYYGVPVW

SEQ ID NO: 14838 - protein, 9 aa, Artificial Sequence
  Description of Artificial Sequence: Synthetic peptide
TSKGLGISY

SEQ ID NO: 14839 - protein, 9 aa, Artificial Sequence
  Description of Artificial Sequence: Synthetic peptide
LGHGVSIEW

SEQ ID NO: 14840 - protein, 11 aa, Artificial Sequence
  Description of Artificial Sequence: Synthetic peptide
SVLSGGKLDAW

SEQ ID NO: 14841 - protein, 10 aa, Artificial Sequence
  Description of Artificial Sequence: Synthetic peptide
KSLFGNDPSQ

SEQ ID NO: 14842 - protein, 11 aa, Artificial Sequence
  Description of Artificial Sequence: Synthetic peptide
VAFQQGEARKF

SEQ ID NO: 14843 - protein, 9 aa, Artificial Sequence
  Description of Artificial Sequence: Synthetic peptide
RSIRLVSGF

SEQ ID NO: 14844 - protein, 9 aa, Artificial Sequence
  Description of Artificial Sequence: Synthetic peptide
KTAVQMAVF

SEQ ID NO: 14845 - protein, 9 aa, Artificial Sequence
  Description of Artificial Sequence: Synthetic peptide
WSKSSIVGW

SEQ ID NO: 14846 - protein, 11 aa, Artificial Sequence
  Description of Artificial Sequence: Synthetic peptide
SSLSFPQITLW

SEQ ID NO: 14847 - protein, 9 aa, Artificial Sequence
  Description of Artificial Sequence: Synthetic peptide
RVRGMQRNW

SEQ ID NO: 14848 - protein, 9 aa, Artificial Sequence
  Description of Artificial Sequence: Synthetic peptide
RSVRLVSGF

SEQ ID NO: 14849 - protein, 9 aa, Artificial Sequence
  Description of Artificial Sequence: Synthetic peptide
FSVPLDKEF

SEQ ID NO: 14850 - protein, 9 aa, Artificial Sequence
  Description of Artificial Sequence: Synthetic peptide
STLQEQITW

SEQ ID NO: 14851 - protein, 9 aa, Artificial Sequence
  Description of Artificial Sequence: Synthetic peptide
KAIEAQQHL

SEQ ID NO: 14852 - protein, 11 aa, Artificial Sequence
  Description of Artificial Sequence: Synthetic peptide
KAYDPEVHNVW

SEQ ID NO: 14853 - protein, 9 aa, Artificial Sequence
  Description of Artificial Sequence: Synthetic peptide
LAFQQGEAW

SEQ ID NO: 14854 - protein, 9 aa, Artificial Sequence
  Description of Artificial Sequence: Synthetic peptide
ISERILTTY

SEQ ID NO: 14855 - protein, 9 aa, Artificial Sequence
  Description of Artificial Sequence: Synthetic peptide
KSTPLCVTL

SEQ ID NO: 14856 - protein, 9 aa, Artificial Sequence
  Description of Artificial Sequence: Synthetic peptide
IQLPDKSSW

SEQ ID NO: 14857 - protein, 9 aa, Artificial Sequence
  Description of Artificial Sequence: Synthetic peptide
RAVGIGAVF

SEQ ID NO: 14858 - protein, 9 aa, Artificial Sequence
  Description of Artificial Sequence: Synthetic peptide
IQLPNKSSW

SEQ ID NO: 14859 - protein, 10 aa, Artificial Sequence
  Description of Artificial Sequence: Synthetic peptide
KAIEAQQHLL

SEQ ID NO: 14860 - protein, 9 aa, Artificial Sequence
  Description of Artificial Sequence: Synthetic peptide
STLQEQIAW

SEQ ID NO: 14861 - protein, 10 aa, Artificial Sequence
  Description of Artificial Sequence: Synthetic peptide
AADKGVSQNY

SEQ ID NO: 14862 - protein, 8 aa, Artificial Sequence
  Description of Artificial Sequence: Synthetic peptide
VEITTHSF

SEQ ID NO: 14863 - protein, 9 aa, Artificial Sequence
  Description of Artificial Sequence: Synthetic peptide
VSKGVSQNY

SEQ ID NO: 14864 - protein, 9 aa, Artificial Sequence
  Description of Artificial Sequence: Synthetic peptide
AAVDLSHFL

SEQ ID NO: 14865 - protein, 9 aa, Artificial Sequence
  Description of Artificial Sequence: Synthetic peptide
KAAVDLSHF

SEQ ID NO: 14866 - protein, 9 aa, Artificial Sequence
  Description of Artificial Sequence: Synthetic peptide
GSEEIKSLY

SEQ ID NO: 14867 - protein, 11 aa, Artificial Sequence
  Description of Artificial Sequence: Synthetic peptide
KSIRIGPGQVF

SEQ ID NO: 14868 - protein, 9 aa, Artificial Sequence
  Description of Artificial Sequence: Synthetic peptide
KTAVQMAVF

SEQ ID NO: 14869 - protein, 9 aa, Artificial Sequence
  Description of Artificial Sequence: Synthetic peptide
KATSTAIMM

SEQ ID NO: 14870 - protein, 9 aa, Artificial Sequence
  Description of Artificial Sequence: Synthetic peptide
GSEELKSLY

SEQ ID NO: 14871 - protein, 8 aa, Artificial Sequence
  Description of Artificial Sequence: Synthetic peptide
GQGVSIEW

SEQ ID NO: 14872 - protein, 9 aa, Artificial Sequence
  Description of Artificial Sequence: Synthetic peptide
KALGPGATL

SEQ ID NO: 14873 - protein, 9 aa, Artificial Sequence
  Description of Artificial Sequence: Synthetic peptide
TINEEAAEW

SEQ ID NO: 14874 - protein, 9 aa, Artificial Sequence
  Description of Artificial Sequence: Synthetic peptide
FIPGNINNL

SEQ ID NO: 14875 - protein, 9 aa, Artificial Sequence
  Description of Artificial Sequence: Synthetic peptide
FIPGDINNL

SEQ ID NO: 14876 - protein, 9 aa, Artificial Sequence
  Description of Artificial Sequence: Synthetic peptide
YSPLSLQTL

SEQ ID NO: 14877 - protein, 8 aa, Artificial Sequence
  Description of Artificial Sequence: Synthetic peptide
NSPASREL

SEQ ID NO: 14878 - protein, 9 aa, Artificial Sequence
  Description of Artificial Sequence: Synthetic peptide
LIPGDINNL

SEQ ID NO: 14879 - protein, 9 aa, Artificial Sequence
  Description of Artificial Sequence: Synthetic peptide
FAPSSGGDL

SEQ ID NO: 14880 - protein, 9 aa, Artificial Sequence
  Description of Artificial Sequence: Synthetic peptide
YSPVSILDI

SEQ ID NO: 14881 - protein, 8 aa, Artificial Sequence
  Description of Artificial Sequence: Synthetic peptide
AAPIAGQI

SEQ ID NO: 14882 - protein, 9 aa, Artificial Sequence
  Description of Artificial Sequence: Synthetic peptide
FIPGNINNL

SEQ ID NO: 14883 - protein, 9 aa, Artificial Sequence
  Description of Artificial Sequence: Synthetic peptide
NAKTIIVQF

SEQ ID NO: 14884 - protein, 10 aa, Artificial Sequence
  Description of Artificial Sequence: Synthetic peptide
VSFDPIPIYY

SEQ ID NO: 14885 - protein, 9 aa, Artificial Sequence
  Description of Artificial Sequence: Synthetic peptide
TSKGLGISY

SEQ ID NO: 14886 - protein, 9 aa, Artificial Sequence
  Description of Artificial Sequence: Synthetic peptide
RAVGIGAVF

SEQ ID NO: 14887 - protein, 9 aa, Artificial Sequence
  Description of Artificial Sequence: Synthetic peptide
AAVDLSHFL

SEQ ID NO: 14888 - protein, 9 aa, Artificial Sequence
  Description of Artificial Sequence: Synthetic peptide
DSKLVIVTY

SEQ ID NO: 14889 - protein, 9 aa, Artificial Sequence
  Description of Artificial Sequence: Synthetic peptide
DSKLVIVSY

SEQ ID NO: 14890 - protein, 9 aa, Artificial Sequence
  Description of Artificial Sequence: Synthetic peptide
TSKGLGISY

SEQ ID NO: 14891 - protein, 9 aa, Artificial Sequence
  Description of Artificial Sequence: Synthetic peptide
ISERILTTY

SEQ ID NO: 14892 - protein, 10 aa, Artificial Sequence
  Description of Artificial Sequence: Synthetic peptide
AADKGVSQNY

SEQ ID NO: 14893 - protein, 9 aa, Artificial Sequence
  Description of Artificial Sequence: Synthetic peptide
DSKLVIITY

SEQ ID NO: 14894 - protein, 9 aa, Artificial Sequence
  Description of Artificial Sequence: Synthetic peptide
VSKGVSQNY

SEQ ID NO: 14895 - protein, 8 aa, Artificial Sequence
  Description of Artificial Sequence: Synthetic peptide
SERILTTY

SEQ ID NO: 14896 - protein, 9 aa, Artificial Sequence
  Description of Artificial Sequence: Synthetic peptide
GSEELKSLY

SEQ ID NO: 14897 - protein, 9 aa, Artificial Sequence
  Description of Artificial Sequence: Synthetic peptide
NAKTIIVQF

SEQ ID NO: 14898 - protein, 9 aa, Artificial Sequence
  Description of Artificial Sequence: Synthetic peptide
GSEEIKSLY

SEQ ID NO: 14899 - protein, 9 aa, Artificial Sequence
  Description of Artificial Sequence: Synthetic peptide
LADQLIHKY

SEQ ID NO: 14900 - protein, 8 aa, Artificial Sequence
  Description of Artificial Sequence: Synthetic peptide
VLDVGDAY

SEQ ID NO: 14901 - protein, 9 aa, Artificial Sequence
  Description of Artificial Sequence: Synthetic peptide
AAVDLSHFL

SEQ ID NO: 14902 - protein, 9 aa, Artificial Sequence
  Description of Artificial Sequence: Synthetic peptide
FIPGNINNL

SEQ ID NO: 14903 - protein, 9 aa, Artificial Sequence
  Description of Artificial Sequence: Synthetic peptide
VAIRVGGQL

SEQ ID NO: 14904 - protein, 9 aa, Artificial Sequence
  Description of Artificial Sequence: Synthetic peptide
ISVESHAAL

SEQ ID NO: 14905 - protein, 9 aa, Artificial Sequence
  Description of Artificial Sequence: Synthetic peptide
KAIEAQQHL

SEQ ID NO: 14906 - protein, 9 aa, Artificial Sequence
  Description of Artificial Sequence: Synthetic peptide
KALGPGATL

SEQ ID NO: 14907 - protein, 9 aa, Artificial Sequence
  Description of Artificial Sequence: Synthetic peptide
LAWDDFRSL

SEQ ID NO: 14908 - protein, 9 aa, Artificial Sequence
  Description of Artificial Sequence: Synthetic peptide
AALDLSHFL

SEQ ID NO: 14909 - protein, 9 aa, Artificial Sequence
  Description of Artificial Sequence: Synthetic peptide
LAWDDLRSL

SEQ ID NO: 14910 - protein, 9 aa, Artificial Sequence
  Description of Artificial Sequence: Synthetic peptide
RAVGIGAVL

SEQ ID NO: 14911 - protein, 9 aa, Artificial Sequence
  Description of Artificial Sequence: Synthetic peptide
YAAPIAGQI

SEQ ID NO: 14912 - protein, 9 aa, Artificial Sequence
  Description of Artificial Sequence: Synthetic peptide
AAVDLSHFL

SEQ ID NO: 14913 - protein, 9 aa, Artificial Sequence
  Description of Artificial Sequence: Synthetic peptide
FIPGNINNL

SEQ ID NO: 14914 - protein, 9 aa, Artificial Sequence
  Description of Artificial Sequence: Synthetic peptide
VAIRVGGQL

SEQ ID NO: 14915 - protein, 9 aa, Artificial Sequence
  Description of Artificial Sequence: Synthetic peptide
KAIEAQQHL

SEQ ID NO: 14916 - protein, 9 aa, Artificial Sequence
  Description of Artificial Sequence: Synthetic peptide
ISVESHAAL

SEQ ID NO: 14917 - protein, 9 aa, Artificial Sequence
  Description of Artificial Sequence: Synthetic peptide
KALGPGATL

SEQ ID NO: 14918 - protein, 9 aa, Artificial Sequence
  Description of Artificial Sequence: Synthetic peptide
AALDLSHFL

SEQ ID NO: 14919 - protein, 9 aa, Artificial Sequence
  Description of Artificial Sequence: Synthetic peptide
GAVDLSHFL

SEQ ID NO: 14920 - protein, 9 aa, Artificial Sequence
  Description of Artificial Sequence: Synthetic peptide
LAWDDFRSL

SEQ ID NO: 14921 - protein, 9 aa, Artificial Sequence
  Description of Artificial Sequence: Synthetic peptide
FIPGDINNL

SEQ ID NO: 14922 - protein, 9 aa, Artificial Sequence
  Description of Artificial Sequence: Synthetic peptide
YAAPIAGQI

SEQ ID NO: 14923 - protein, 9 aa, Artificial Sequence
  Description of Artificial Sequence: Synthetic peptide
ATDIQTKEL

SEQ ID NO: 14924 - protein, 9 aa, Artificial Sequence
  Description of Artificial Sequence: Synthetic peptide
YVDRFFKTL

SEQ ID NO: 14925 - protein, 9 aa, Artificial Sequence
  Description of Artificial Sequence: Synthetic peptide
RAVGIGAVL

SEQ ID NO: 14926 - protein, 9 aa, Artificial Sequence
  Description of Artificial Sequence: Synthetic peptide
LAWDDLRSL

SEQ ID NO: 14927 - protein, 9 aa, Artificial Sequence
  Description of Artificial Sequence: Synthetic peptide
SAEPVPLQL

SEQ ID NO: 14928 - protein, 9 aa, Artificial Sequence
  Description of Artificial Sequence: Synthetic peptide
QYDQVPIEI

SEQ ID NO: 14929 - protein, 9 aa, Artificial Sequence
  Description of Artificial Sequence: Synthetic peptide
FLDNVTENF

SEQ ID NO: 14930 - protein, 9 aa, Artificial Sequence
  Description of Artificial Sequence: Synthetic peptide
SFDPIPIYY

SEQ ID NO: 14931 - protein, 9 aa, Artificial Sequence
  Description of Artificial Sequence: Synthetic peptide
QYDQIPIEI

SEQ ID NO: 14932 - protein, 9 aa, Artificial Sequence
  Description of Artificial Sequence: Synthetic peptide
SFDPIPIHY

SEQ ID NO: 14933 - protein, 9 aa, Artificial Sequence
  Description of Artificial Sequence: Synthetic peptide
MSDINGTSL

SEQ ID NO: 14934 - protein, 9 aa, Artificial Sequence
  Description of Artificial Sequence: Synthetic peptide
FLDNVTENF

SEQ ID NO: 14935 - protein, 8 aa, Artificial Sequence
  Description of Artificial Sequence: Synthetic peptide
HTDNGSNF

SEQ ID NO: 14936 - protein, 9 aa, Artificial Sequence
  Description of Artificial Sequence: Synthetic peptide
SAEPVPLQL

SEQ ID NO: 14937 - protein, 8 aa, Artificial Sequence
  Description of Artificial Sequence: Synthetic peptide
AVDLSHFL

SEQ ID NO: 14938 - protein, 9 aa, Artificial Sequence
  Description of Artificial Sequence: Synthetic peptide
ITDNAKTII

SEQ ID NO: 14939 - protein, 9 aa, Artificial Sequence
  Description of Artificial Sequence: Synthetic peptide
IQDNNEIKV

SEQ ID NO: 14940 - protein, 9 aa, Artificial Sequence
  Description of Artificial Sequence: Synthetic peptide
LTDVVPLTV

SEQ ID NO: 14941 - protein, 9 aa, Artificial Sequence
  Description of Artificial Sequence: Synthetic peptide
ISDNTKTII

SEQ ID NO: 14942 - protein, 9 aa, Artificial Sequence
  Description of Artificial Sequence: Synthetic peptide
ISDNAKTII

SEQ ID NO: 14943 - protein, 9 aa, Artificial Sequence
  Description of Artificial Sequence: Synthetic peptide
VLDVGDAYF

SEQ ID NO: 14944 - protein, 9 aa, Artificial Sequence
  Description of Artificial Sequence: Synthetic peptide
AADKLWVTV

SEQ ID NO: 14945 - protein, 9 aa, Artificial Sequence
  Description of Artificial Sequence: Synthetic peptide
ARQNQIRQI

SEQ ID NO: 14946 - protein, 9 aa, Artificial Sequence
  Description of Artificial Sequence: Synthetic peptide
QRPVVTIKV

SEQ ID NO: 14947 - protein, 9 aa, Artificial Sequence
  Description of Artificial Sequence: Synthetic peptide
QRPLVTIKV

SEQ ID NO: 14948 - protein, 9 aa, Artificial Sequence
  Description of Artificial Sequence: Synthetic peptide
ARNPEIVVY

SEQ ID NO: 14949 - protein, 9 aa, Artificial Sequence
  Description of Artificial Sequence: Synthetic peptide
ARNPEIVVY

SEQ ID NO: 14950 - protein, 9 aa, Artificial Sequence
  Description of Artificial Sequence: Synthetic peptide
AAVDLSHFL

SEQ ID NO: 14951 - protein, 9 aa, Artificial Sequence
  Description of Artificial Sequence: Synthetic peptide
SAISLFDTI

SEQ ID NO: 14952 - protein, 9 aa, Artificial Sequence
  Description of Artificial Sequence: Synthetic peptide
QINNSNTSY

SEQ ID NO: 14953 - protein, 9 aa, Artificial Sequence
  Description of Artificial Sequence: Synthetic peptide
TLIKIATEF

SEQ ID NO: 14954 - protein, 9 aa, Artificial Sequence
  Description of Artificial Sequence: Synthetic peptide
TLKNVSGEF

SEQ ID NO: 14955 - protein, 9 aa, Artificial Sequence
  Description of Artificial Sequence: Synthetic peptide
TLRPGGGDM

SEQ ID NO: 14956 - protein, 9 aa, Artificial Sequence
  Description of Artificial Sequence: Synthetic peptide
ISVESHAAL

SEQ ID NO: 14957 - protein, 9 aa, Artificial Sequence
  Description of Artificial Sequence: Synthetic peptide
FIPGNINNL

SEQ ID NO: 14958 - protein, 10 aa, Artificial Sequence
  Description of Artificial Sequence: Synthetic peptide
VPIEKNTTSY

SEQ ID NO: 14959 - protein, 9 aa, Artificial Sequence
  Description of Artificial Sequence: Synthetic peptide
SAEPVPLQL

SEQ ID NO: 14960 - protein, 9 aa, Artificial Sequence
  Description of Artificial Sequence: Synthetic peptide
ILRPIGGEM

SEQ ID NO: 14961 - protein, 9 aa, Artificial Sequence
  Description of Artificial Sequence: Synthetic peptide
DQYNKTVGF

SEQ ID NO: 14962 - protein, 9 aa, Artificial Sequence
  Description of Artificial Sequence: Synthetic peptide
KAIEAQQHL

SEQ ID NO: 14963 - protein, 9 aa, Artificial Sequence
  Description of Artificial Sequence: Synthetic peptide
FLGAAGSTM

SEQ ID NO: 14964 - protein, 9 aa, Artificial Sequence
  Description of Artificial Sequence: Synthetic peptide
EQAPPLVSL

SEQ ID NO: 14965 - protein, 9 aa, Artificial Sequence
  Description of Artificial Sequence: Synthetic peptide
FIPGDINNL

SEQ ID NO: 14966 - protein, 9 aa, Artificial Sequence
  Description of Artificial Sequence: Synthetic peptide
MSDINGTSL

SEQ ID NO: 14967 - protein, 9 aa, Artificial Sequence
  Description of Artificial Sequence: Synthetic peptide
TVLDVGDAY

SEQ ID NO: 14968 - protein, 9 aa, Artificial Sequence
  Description of Artificial Sequence: Synthetic peptide
AALDLSHFL

SEQ ID NO: 14969 - protein, 9 aa, Artificial Sequence
  Description of Artificial Sequence: Synthetic peptide
DSKLVIVSY

SEQ ID NO: 14970 - protein, 9 aa, Artificial Sequence
  Description of Artificial Sequence: Synthetic peptide
GAVDLSHFL

SEQ ID NO: 14971 - protein, 9 aa, Artificial Sequence
  Description of Artificial Sequence: Synthetic peptide
IVTDSQYAL

SEQ ID NO: 14972 - protein, 10 aa, Artificial Sequence
  Description of Artificial Sequence: Synthetic peptide
EISERILTTY

SEQ ID NO: 14973 - protein, 9 aa, Artificial Sequence
  Description of Artificial Sequence: Synthetic peptide
NCTDVNITM

SEQ ID NO: 14974 - protein, 9 aa, Artificial Sequence
  Description of Artificial Sequence: Synthetic peptide
AADKLWVTV

SEQ ID NO: 14975 - protein, 9 aa, Artificial Sequence
  Description of Artificial Sequence: Synthetic peptide
MSDINGTSL

SEQ ID NO: 14976 - protein, 8 aa, Artificial Sequence
  Description of Artificial Sequence: Synthetic peptide
AVDLSHFL

SEQ ID NO: 14977 - protein, 9 aa, Artificial Sequence
  Description of Artificial Sequence: Synthetic peptide
ATDIQTKEL

SEQ ID NO: 14978 - protein, 9 aa, Artificial Sequence
  Description of Artificial Sequence: Synthetic peptide
FLDNVTENF

SEQ ID NO: 14979 - protein, 8 aa, Artificial Sequence
  Description of Artificial Sequence: Synthetic peptide
ALDLSHFL

SEQ ID NO: 14980 - protein, 9 aa, Artificial Sequence
  Description of Artificial Sequence: Synthetic peptide
SLDFPQITL

SEQ ID NO: 14981 - protein, 9 aa, Artificial Sequence
  Description of Artificial Sequence: Synthetic peptide
ISDNTKTII

SEQ ID NO: 14982 - protein, 9 aa, Artificial Sequence
  Description of Artificial Sequence: Synthetic peptide
TQDFWEVQL

SEQ ID NO: 14983 - protein, 9 aa, Artificial Sequence
  Description of Artificial Sequence: Synthetic peptide
HPDKSESEL

SEQ ID NO: 14984 - protein, 9 aa, Artificial Sequence
  Description of Artificial Sequence: Synthetic peptide
LTDVVPLTV

SEQ ID NO: 14985 - protein, 10 aa, Artificial Sequence
  Description of Artificial Sequence: Synthetic peptide
HQDPVPKQPL

SEQ ID NO: 14986 - protein, 9 aa, Artificial Sequence
  Description of Artificial Sequence: Synthetic peptide
ISDNAKTII

SEQ ID NO: 14987 - protein, 9 aa, Artificial Sequence
  Description of Artificial Sequence: Synthetic peptide
SAEPVPLQL

SEQ ID NO: 14988 - protein, 8 aa, Artificial Sequence
  Description of Artificial Sequence: Synthetic peptide
GQMVHQSL

SEQ ID NO: 14989 - protein, 8 aa, Artificial Sequence
  Description of Artificial Sequence: Synthetic peptide
GQMVHQAL

SEQ ID NO: 14990 - protein, 9 aa, Artificial Sequence
  Description of Artificial Sequence: Synthetic peptide
GQKAIGTVL

SEQ ID NO: 14991 - protein, 9 aa, Artificial Sequence
  Description of Artificial Sequence: Synthetic peptide
SQVTATSVL

SEQ ID NO: 14992 - protein, 9 aa, Artificial Sequence
  Description of Artificial Sequence: Synthetic peptide
RAVGMGAVL

SEQ ID NO: 14993 - protein, 9 aa, Artificial Sequence
  Description of Artificial Sequence: Synthetic peptide
SQVTSTSIL

SEQ ID NO: 14994 - protein, 9 aa, Artificial Sequence
  Description of Artificial Sequence: Synthetic peptide
EQAPPLVSL

SEQ ID NO: 14995 - protein, 8 aa, Artificial Sequence
  Description of Artificial Sequence: Synthetic peptide
RQGTVSSL

SEQ ID NO: 14996 - protein, 9 aa, Artificial Sequence
  Description of Artificial Sequence: Synthetic peptide
GLYPPLTSL

SEQ ID NO: 14997 - protein, 9 aa, Artificial Sequence
  Description of Artificial Sequence: Synthetic peptide
RAVGIGAVL

SEQ ID NO: 14998 - protein, 10 aa, Artificial Sequence
  Description of Artificial Sequence: Synthetic peptide
VSFDPIPIYY

SEQ ID NO: 14999 - protein, 9 aa, Artificial Sequence
  Description of Artificial Sequence: Synthetic peptide
NAKTIIVQF

SEQ ID NO: 15000 - protein, 10 aa, Artificial Sequence
  Description of Artificial Sequence: Synthetic peptide
VSFDPIPIHY

SEQ ID NO: 15001 - protein, 9 aa, Artificial Sequence
  Description of Artificial Sequence: Synthetic peptide
YAAPIAGQI

SEQ ID NO: 15002 - protein, 9 aa, Artificial Sequence
  Description of Artificial Sequence: Synthetic peptide
NTKNIIVQF

SEQ ID NO: 15003 - protein, 9 aa, Artificial Sequence
  Description of Artificial Sequence: Synthetic peptide
AAVDLSHFL

SEQ ID NO: 15004 - protein, 9 aa, Artificial Sequence
  Description of Artificial Sequence: Synthetic peptide
NTKTIIVQF

SEQ ID NO: 15005 - protein, 9 aa, Artificial Sequence
  Description of Artificial Sequence: Synthetic peptide
GAASITLTV

SEQ ID NO: 15006 - protein, 11 aa, Artificial Sequence
  Description of Artificial Sequence: Synthetic peptide
KAYDPEVHNVW

SEQ ID NO: 15007 - protein, 9 aa, Artificial Sequence
  Description of Artificial Sequence: Synthetic peptide
VAKEVQSHL

SEQ ID NO: 15008 - protein, 8 aa, Artificial Sequence
  Description of Artificial Sequence: Synthetic peptide
SFNVTTEL

SEQ ID NO: 15009 - protein, 9 aa, Artificial Sequence
  Description of Artificial Sequence: Synthetic peptide
IYQEPHRNL

SEQ ID NO: 15010 - protein, 9 aa, Artificial Sequence
  Description of Artificial Sequence: Synthetic peptide
IYQEPHKNL

SEQ ID NO: 15011 - protein, 9 aa, Artificial Sequence
  Description of Artificial Sequence: Synthetic peptide
VYIEYKKQL

SEQ ID NO: 15012 - protein, 9 aa, Artificial Sequence
  Description of Artificial Sequence: Synthetic peptide
IYQEPYKNL

SEQ ID NO: 15013 - protein, 9 aa, Artificial Sequence
  Description of Artificial Sequence: Synthetic peptide
VFYATGTVL

SEQ ID NO: 15014 - protein, 8 aa, Artificial Sequence
  Description of Artificial Sequence: Synthetic peptide
FYATGTVL

SEQ ID NO: 15015 - protein, 10 aa, Artificial Sequence
  Description of Artificial Sequence: Synthetic peptide
LFIPGNINNL

SEQ ID NO: 15016 - protein, 9 aa, Artificial Sequence
  Description of Artificial Sequence: Synthetic peptide
VYIEYKKIL

SEQ ID NO: 15017 - protein, 9 aa, Artificial Sequence
  Description of Artificial Sequence: Synthetic peptide
FIPGNINNL

SEQ ID NO: 15018 - protein, 8 aa, Artificial Sequence
  Description of Artificial Sequence: Synthetic peptide
FYYNTSGL

SEQ ID NO: 15019 - protein, 10 aa, Artificial Sequence
  Description of Artificial Sequence: Synthetic peptide
GFLGAAGSTM

SEQ ID NO: 15020 - protein, 8 aa, Artificial Sequence
  Description of Artificial Sequence: Synthetic peptide
YYNTSGLF

SEQ ID NO: 15021 - protein, 8 aa, Artificial Sequence
  Description of Artificial Sequence: Synthetic peptide
VYHTQGYF

SEQ ID NO: 15022 - protein, 9 aa, Artificial Sequence
  Description of Artificial Sequence: Synthetic peptide
TYQIYQEPY

SEQ ID NO: 15023 - protein, 9 aa, Artificial Sequence
  Description of Artificial Sequence: Synthetic peptide
FFYYNTSGL

SEQ ID NO: 15024 - protein, 9 aa, Artificial Sequence
  Description of Artificial Sequence: Synthetic peptide
KYHSNWRAM

SEQ ID NO: 15025 - protein, 8 aa, Artificial Sequence
  Description of Artificial Sequence: Synthetic peptide
NYPIVQNL

SEQ ID NO: 15026 - protein, 8 aa, Artificial Sequence
  Description of Artificial Sequence: Synthetic peptide
SFNVTTEL

SEQ ID NO: 15027 - protein, 9 aa, Artificial Sequence
  Description of Artificial Sequence: Synthetic peptide
IYQEPHRNL

SEQ ID NO: 15028 - protein, 8 aa, Artificial Sequence
  Description of Artificial Sequence: Synthetic peptide
FYATGTVL

SEQ ID NO: 15029 - protein, 9 aa, Artificial Sequence
  Description of Artificial Sequence: Synthetic peptide
KYLGNLAQY

SEQ ID NO: 15030 - protein, 9 aa, Artificial Sequence
  Description of Artificial Sequence: Synthetic peptide
IYQEPHKNL

SEQ ID NO: 15031 - protein, 9 aa, Artificial Sequence
  Description of Artificial Sequence: Synthetic peptide
IYQEPYKNL

SEQ ID NO: 15032 - protein, 10 aa, Artificial Sequence
  Description of Artificial Sequence: Synthetic peptide
GFLGAAGSTM

SEQ ID NO: 15033 - protein, 9 aa, Artificial Sequence
  Description of Artificial Sequence: Synthetic peptide
VFYATGTVL

SEQ ID NO: 15034 - protein, 8 aa, Artificial Sequence
  Description of Artificial Sequence: Synthetic peptide
LYNTVAVL

SEQ ID NO: 15035 - protein, 9 aa, Artificial Sequence
  Description of Artificial Sequence: Synthetic peptide
TYQIYQEPY

SEQ ID NO: 15036 - protein, 9 aa, Artificial Sequence
  Description of Artificial Sequence: Synthetic peptide
TSNITGLLL

SEQ ID NO: 15037 - protein, 9 aa, Artificial Sequence
  Description of Artificial Sequence: Synthetic peptide
LTDVVPLTV

SEQ ID NO: 15038 - protein, 9 aa, Artificial Sequence
  Description of Artificial Sequence: Synthetic peptide
ANSPASREL

SEQ ID NO: 15039 - protein, 9 aa, Artificial Sequence
  Description of Artificial Sequence: Synthetic peptide
NSNITGLLL

SEQ ID NO: 15040 - protein, 9 aa, Artificial Sequence
  Description of Artificial Sequence: Synthetic peptide
GAASITLTV

SEQ ID NO: 15041 - protein, 9 aa, Artificial Sequence
  Description of Artificial Sequence: Synthetic peptide
IATEFKDQY

SEQ ID NO: 15042 - protein, 9 aa, Artificial Sequence
  Description of Artificial Sequence: Synthetic peptide
VSTGIRKVL

SEQ ID NO: 15043 - protein, 9 aa, Artificial Sequence
  Description of Artificial Sequence: Synthetic peptide
AAVDLSHFL

SEQ ID NO: 15044 - protein, 9 aa, Artificial Sequence
  Description of Artificial Sequence: Synthetic peptide
KATSTAIMM

SEQ ID NO: 15045 - protein, 9 aa, Artificial Sequence
  Description of Artificial Sequence: Synthetic peptide
KATGAAIMM

SEQ ID NO: 15046 - protein, 9 aa, Artificial Sequence
  Description of Artificial Sequence: Synthetic peptide
VSSGIRKVL

SEQ ID NO: 15047 - protein, 9 aa, Artificial Sequence
  Description of Artificial Sequence: Synthetic peptide
VARERHPEF

SEQ ID NO: 15048 - protein, 9 aa, Artificial Sequence
  Description of Artificial Sequence: Synthetic peptide
IARERHPEY

SEQ ID NO: 15049 - protein, 9 aa, Artificial Sequence
  Description of Artificial Sequence: Synthetic peptide
AAVDLSHFL

SEQ ID NO: 15050 - protein, 9 aa, Artificial Sequence
  Description of Artificial Sequence: Synthetic peptide
KAIEAQQHL

SEQ ID NO: 15051 - protein, 9 aa, Artificial Sequence
  Description of Artificial Sequence: Synthetic peptide
ANSPASREL

SEQ ID NO: 15052 - protein, 10 aa, Artificial Sequence
  Description of Artificial Sequence: Synthetic peptide
IATDIQTKEL

SEQ ID NO: 15053 - protein, 9 aa, Artificial Sequence
  Description of Artificial Sequence: Synthetic peptide
VAKEVQSHL

SEQ ID NO: 15054 - protein, 9 aa, Artificial Sequence
  Description of Artificial Sequence: Synthetic peptide
IATEFKDQY

SEQ ID NO: 15055 - protein, 8 aa, Artificial Sequence
  Description of Artificial Sequence: Synthetic peptide
VAAEVKNL

SEQ ID NO: 15056 - protein, 9 aa, Artificial Sequence
  Description of Artificial Sequence: Synthetic peptide
AAAPGVGAV

SEQ ID NO: 15057 - protein, 9 aa, Artificial Sequence
  Description of Artificial Sequence: Synthetic peptide
KATSTAIMM

SEQ ID NO: 15058 - protein, 9 aa, Artificial Sequence
  Description of Artificial Sequence: Synthetic peptide
VSTGIRKVL

SEQ ID NO: 15059 - protein, 9 aa, Artificial Sequence
  Description of Artificial Sequence: Synthetic peptide
GAASITLTV

SEQ ID NO: 15060 - protein, 11 aa, Artificial Sequence
  Description of Artificial Sequence: Synthetic peptide
AEQASQEVKGW

SEQ ID NO: 15061 - protein, 9 aa, Artificial Sequence
  Description of Artificial Sequence: Synthetic peptide
ARNPEIVVY

SEQ ID NO: 15062 - protein, 9 aa, Artificial Sequence
  Description of Artificial Sequence: Synthetic peptide
YAAPIAGQI

SEQ ID NO: 15063 - protein, 9 aa, Artificial Sequence
  Description of Artificial Sequence: Synthetic peptide
IRIGPGQTF

SEQ ID NO: 15064 - protein, 9 aa, Artificial Sequence
  Description of Artificial Sequence: Synthetic peptide
AAVDLSHFL

SEQ ID NO: 15065 - protein, 11 aa, Artificial Sequence
  Description of Artificial Sequence: Synthetic peptide
SEVNIVTDSQY

SEQ ID NO: 15066 - protein, 9 aa, Artificial Sequence
  Description of Artificial Sequence: Synthetic peptide
IRIGPGQVF

SEQ ID NO: 15067 - protein, 11 aa, Artificial Sequence
  Description of Artificial Sequence: Synthetic peptide
AEQATQEVKGW

SEQ ID NO: 15068 - protein, 9 aa, Artificial Sequence
  Description of Artificial Sequence: Synthetic peptide
SESAIRNAI

SEQ ID NO: 15069 - protein, 9 aa, Artificial Sequence
  Description of Artificial Sequence: Synthetic peptide
GAAAITLTA

SEQ ID NO: 15070 - protein, 9 aa, Artificial Sequence
  Description of Artificial Sequence: Synthetic peptide
FIPGNINNL

SEQ ID NO: 15071 - protein, 9 aa, Artificial Sequence
  Description of Artificial Sequence: Synthetic peptide
AAVDLSHFL

SEQ ID NO: 15072 - protein, 9 aa, Artificial Sequence
  Description of Artificial Sequence: Synthetic peptide
FIPGDINNL

SEQ ID NO: 15073 - protein, 9 aa, Artificial Sequence
  Description of Artificial Sequence: Synthetic peptide
SAEPVPLQL

SEQ ID NO: 15074 - protein, 9 aa, Artificial Sequence
  Description of Artificial Sequence: Synthetic peptide
AALDLSHFL

SEQ ID NO: 15075 - protein, 9 aa, Artificial Sequence
  Description of Artificial Sequence: Synthetic peptide
GAVDLSHFL

SEQ ID NO: 15076 - protein, 8 aa, Artificial Sequence
  Description of Artificial Sequence: Synthetic peptide
FALNPSLL

SEQ ID NO: 15077 - protein, 10 aa, Artificial Sequence
  Description of Artificial Sequence: Synthetic peptide
RAVGIGAVFL

SEQ ID NO: 15078 - protein, 9 aa, Artificial Sequence
  Description of Artificial Sequence: Synthetic peptide
KATGAAIMM

SEQ ID NO: 15079 - protein, 9 aa, Artificial Sequence
  Description of Artificial Sequence: Synthetic peptide
YAAPIAGQI

SEQ ID NO: 15080 - protein, 11 aa, Artificial Sequence
  Description of Artificial Sequence: Synthetic peptide
ETEPIIGAETY

SEQ ID NO: 15081 - protein, 11 aa, Artificial Sequence
  Description of Artificial Sequence: Synthetic peptide
ETEPIPGAETY

SEQ ID NO: 15082 - protein, 11 aa, Artificial Sequence
  Description of Artificial Sequence: Synthetic peptide
ETEPIPGVETY

SEQ ID NO: 15083 - protein, 8 aa, Artificial Sequence
  Description of Artificial Sequence: Synthetic peptide
VLDVGDAY

SEQ ID NO: 15084 - protein, 9 aa, Artificial Sequence
  Description of Artificial Sequence: Synthetic peptide
SFDPIPIHY

SEQ ID NO: 15085 - protein, 10 aa, Artificial Sequence
  Description of Artificial Sequence: Synthetic peptide
VTVLDVGDAY

SEQ ID NO: 15086 - protein, 9 aa, Artificial Sequence
  Description of Artificial Sequence: Synthetic peptide
STRNITEEY

SEQ ID NO: 15087 - protein, 9 aa, Artificial Sequence
  Description of Artificial Sequence: Synthetic peptide
QLTEVVQKI

SEQ ID NO: 15088 - protein, 9 aa, Artificial Sequence
  Description of Artificial Sequence: Synthetic peptide
VLAEAMSQA

SEQ ID NO: 15089 - protein, 10 aa, Artificial Sequence
  Description of Artificial Sequence: Synthetic peptide
AMDEGNSSQV

SEQ ID NO: 15090 - protein, 9 aa, Artificial Sequence
  Description of Artificial Sequence: Synthetic peptide
IMAQLQPAL

SEQ ID NO: 15091 - protein, 9 aa, Artificial Sequence
  Description of Artificial Sequence: Synthetic peptide
ILKEPVHGV

SEQ ID NO: 15092 - protein, 9 aa, Artificial Sequence
  Description of Artificial Sequence: Synthetic peptide
SLFNTVATL

SEQ ID NO: 15093 - protein, 9 aa, Artificial Sequence
  Description of Artificial Sequence: Synthetic peptide
SLAEGEIMI

SEQ ID NO: 15094 - protein, 10 aa, Artificial Sequence
  Description of Artificial Sequence: Synthetic peptide
ALNPGLLETA

SEQ ID NO: 15095 - protein, 9 aa, Artificial Sequence
  Description of Artificial Sequence: Synthetic peptide
GLCKNVSTV

SEQ ID NO: 15096 - protein, 9 aa, Artificial Sequence
  Description of Artificial Sequence: Synthetic peptide
ALQDSQSEV

SEQ ID NO: 15097 - protein, 10 aa, Artificial Sequence
  Description of Artificial Sequence: Synthetic peptide
TLWQRPLVTV

SEQ ID NO: 15098 - protein, 9 aa, Artificial Sequence
  Description of Artificial Sequence: Synthetic peptide
AVLSIVNRV

SEQ ID NO: 15099 - protein, 9 aa, Artificial Sequence
  Description of Artificial Sequence: Synthetic peptide
ALTEICTEM

SEQ ID NO: 15100 - protein, 9 aa, Artificial Sequence
  Description of Artificial Sequence: Synthetic peptide
LLDTIAIAV

SEQ ID NO: 15101 - protein, 9 aa, Artificial Sequence
  Description of Artificial Sequence: Synthetic peptide
SLAEEDIRI

SEQ ID NO: 15102 - protein, 9 aa, Artificial Sequence
  Description of Artificial Sequence: Synthetic peptide
NLIDTVAIA

SEQ ID NO: 15103 - protein, 9 aa, Artificial Sequence
  Description of Artificial Sequence: Synthetic peptide
ALTDIVPLT

SEQ ID NO: 15104 - protein, 9 aa, Artificial Sequence
  Description of Artificial Sequence: Synthetic peptide
AVLSIINRV

SEQ ID NO: 15105 - protein, 9 aa, Artificial Sequence
  Description of Artificial Sequence: Synthetic peptide
IQDNNEIKV

SEQ ID NO: 15106 - protein, 9 aa, Artificial Sequence
  Description of Artificial Sequence: Synthetic peptide
KLVPVDPAV

SEQ ID NO: 15107 - protein, 9 aa, Artificial Sequence
  Description of Artificial Sequence: Synthetic peptide
IVTDSQYAL

SEQ ID NO: 15108 - protein, 9 aa, Artificial Sequence
  Description of Artificial Sequence: Synthetic peptide
ILKEPVHGV

SEQ ID NO: 15109 - protein, 9 aa, Artificial Sequence
  Description of Artificial Sequence: Synthetic peptide
VLAEAMSQA

SEQ ID NO: 15110 - protein, 9 aa, Artificial Sequence
  Description of Artificial Sequence: Synthetic peptide
SLFNTVATL

SEQ ID NO: 15111 - protein, 9 aa, Artificial Sequence
  Description of Artificial Sequence: Synthetic peptide
QLTEVVQKI

SEQ ID NO: 15112 - protein, 9 aa, Artificial Sequence
  Description of Artificial Sequence: Synthetic peptide
TLNAWVKVV

SEQ ID NO: 15113 - protein, 9 aa, Artificial Sequence
  Description of Artificial Sequence: Synthetic peptide
SISERILSA

SEQ ID NO: 15114 - protein, 10 aa, Artificial Sequence
  Description of Artificial Sequence: Synthetic peptide
TLWQRPLVTV

SEQ ID NO: 15115 - protein, 10 aa, Artificial Sequence
  Description of Artificial Sequence: Synthetic peptide
ALNPGLLETA

SEQ ID NO: 15116 - protein, 10 aa, Artificial Sequence
  Description of Artificial Sequence: Synthetic peptide
YLKDQQLLGI

SEQ ID NO: 15117 - protein, 9 aa, Artificial Sequence
  Description of Artificial Sequence: Synthetic peptide
AIIGDIRQA

SEQ ID NO: 15118 - protein, 10 aa, Artificial Sequence
  Description of Artificial Sequence: Synthetic peptide
YLRDQQLLGI

SEQ ID NO: 15119 - protein, 9 aa, Artificial Sequence
  Description of Artificial Sequence: Synthetic peptide
VVKIKPLGV

SEQ ID NO: 15120 - protein, 9 aa, Artificial Sequence
  Description of Artificial Sequence: Synthetic peptide
GLCKNVSTV

SEQ ID NO: 15121 - protein, 9 aa, Artificial Sequence
  Description of Artificial Sequence: Synthetic peptide
ALKALVTPT

SEQ ID NO: 15122 - protein, 9 aa, Artificial Sequence
  Description of Artificial Sequence: Synthetic peptide
MLKNVTAQL

SEQ ID NO: 15123 - protein, 9 aa, Artificial Sequence
  Description of Artificial Sequence: Synthetic peptide
ALFYKLDVV

SEQ ID NO: 15124 - protein, 9 aa, Artificial Sequence
  Description of Artificial Sequence: Synthetic peptide
ALIRILQQL

SEQ ID NO: 15125 - protein, 9 aa, Artificial Sequence
  Description of Artificial Sequence: Synthetic peptide
ASITLTVQV

SEQ ID NO: 15126 - protein, 10 aa, Artificial Sequence
  Description of Artificial Sequence: Synthetic peptide
GLFNNNISNI

SEQ ID NO: 15127 - protein, 9 aa, Artificial Sequence
  Description of Artificial Sequence: Synthetic peptide
QLQARVLAV

SEQ ID NO: 15128 - protein, 11 aa, Artificial Sequence
  Description of Artificial Sequence: Synthetic peptide
FLKEKGGLEGL

SEQ ID NO: 15129 - protein, 9 aa, Artificial Sequence
  Description of Artificial Sequence: Synthetic peptide
ASITLTAQV

SEQ ID NO: 15130 - protein, 9 aa, Artificial Sequence
  Description of Artificial Sequence: Synthetic peptide
GAASITLTV

SEQ ID NO: 15131 - protein, 9 aa, Artificial Sequence
  Description of Artificial Sequence: Synthetic peptide
ALNPGLLET

SEQ ID NO: 15132 - protein, 11 aa, Artificial Sequence
  Description of Artificial Sequence: Synthetic peptide
FLKEKGGLDGL

SEQ ID NO: 15133 - protein, 9 aa, Artificial Sequence
  Description of Artificial Sequence: Synthetic peptide
AVLSIVNRV

SEQ ID NO: 15134 - protein, 10 aa, Artificial Sequence
  Description of Artificial Sequence: Synthetic peptide
KLVPVDPAVV

SEQ ID NO: 15135 - protein, 9 aa, Artificial Sequence
  Description of Artificial Sequence: Synthetic peptide
RAIEVVQRV

SEQ ID NO: 15136 - protein, 10 aa, Artificial Sequence
  Description of Artificial Sequence: Synthetic peptide
ALTDIVPLTA

SEQ ID NO: 15137 - protein, 9 aa, Artificial Sequence
  Description of Artificial Sequence: Synthetic peptide
ELKKIIGQV

SEQ ID NO: 15138 - protein, 8 aa, Artificial Sequence
  Description of Artificial Sequence: Synthetic peptide
VLSIVNRV

SEQ ID NO: 15139 - protein, 9 aa, Artificial Sequence
  Description of Artificial Sequence: Synthetic peptide
AVLSIINRV

SEQ ID NO: 15140 - protein, 9 aa, Artificial Sequence
  Description of Artificial Sequence: Synthetic peptide
ALTDIVSMT

SEQ ID NO: 15141 - protein, 8 aa, Artificial Sequence
  Description of Artificial Sequence: Synthetic peptide
VLSIINRV

SEQ ID NO: 15142 - protein, 9 aa, Artificial Sequence
  Description of Artificial Sequence: Synthetic peptide
EIKSLFNTV

SEQ ID NO: 15143 - protein, 9 aa, Artificial Sequence
  Description of Artificial Sequence: Synthetic peptide
SLGVAPTRA

SEQ ID NO: 15144 - protein, 10 aa, Artificial Sequence
  Description of Artificial Sequence: Synthetic peptide
GLIGLRIVFA

SEQ ID NO: 15145 - protein, 9 aa, Artificial Sequence
  Description of Artificial Sequence: Synthetic peptide
ELRSLFNTV

SEQ ID NO: 15146 - protein, 9 aa, Artificial Sequence
  Description of Artificial Sequence: Synthetic peptide
TVKIKSLGV

SEQ ID NO: 15147 - protein, 10 aa, Artificial Sequence
  Description of Artificial Sequence: Synthetic peptide
HLRDFILIAA

SEQ ID NO: 15148 - protein, 10 aa, Artificial Sequence
  Description of Artificial Sequence: Synthetic peptide
ALNPDLLETA

SEQ ID NO: 15149 - protein, 9 aa, Artificial Sequence
  Description of Artificial Sequence: Synthetic peptide
ALQDSQSEV

SEQ ID NO: 15150 - protein, 9 aa, Artificial Sequence
  Description of Artificial Sequence: Synthetic peptide
NLIDTVAIA

SEQ ID NO: 15151 - protein, 9 aa, Artificial Sequence
  Description of Artificial Sequence: Synthetic peptide
TLTAQVRQL

SEQ ID NO: 15152 - protein, 9 aa, Artificial Sequence
  Description of Artificial Sequence: Synthetic peptide
SAINLIDTV

SEQ ID NO: 15153 - protein, 9 aa, Artificial Sequence
  Description of Artificial Sequence: Synthetic peptide
AILNVPTRI

SEQ ID NO: 15154 - protein, 9 aa, Artificial Sequence
  Description of Artificial Sequence: Synthetic peptide
SLGIAPTRA

SEQ ID NO: 15155 - protein, 10 aa, Artificial Sequence
  Description of Artificial Sequence: Synthetic peptide
GLISLKIIFA

SEQ ID NO: 15156 - protein, 9 aa, Artificial Sequence
  Description of Artificial Sequence: Synthetic peptide
GLGQWTYQV

SEQ ID NO: 15157 - protein, 9 aa, Artificial Sequence
  Description of Artificial Sequence: Synthetic peptide
SISNWLWYI

SEQ ID NO: 15158 - protein, 9 aa, Artificial Sequence
  Description of Artificial Sequence: Synthetic peptide
AVLSIINRV

SEQ ID NO: 15159 - protein, 9 aa, Artificial Sequence
  Description of Artificial Sequence: Synthetic peptide
SLFNTVATL

SEQ ID NO: 15160 - protein, 9 aa, Artificial Sequence
  Description of Artificial Sequence: Synthetic peptide
ALIRILQQL

SEQ ID NO: 15161 - protein, 9 aa, Artificial Sequence
  Description of Artificial Sequence: Synthetic peptide
LLLYWAREL

SEQ ID NO: 15162 - protein, 9 aa, Artificial Sequence
  Description of Artificial Sequence: Synthetic peptide
TLNAWVKVV

SEQ ID NO: 15163 - protein, 9 aa, Artificial Sequence
  Description of Artificial Sequence: Synthetic peptide
AVLSIVNRV

SEQ ID NO: 15164 - protein, 9 aa, Artificial Sequence
  Description of Artificial Sequence: Synthetic peptide
QLTEVVQKI

SEQ ID NO: 15165 - protein, 9 aa, Artificial Sequence
  Description of Artificial Sequence: Synthetic peptide
ILKEPVHGV

SEQ ID NO: 15166 - protein, 9 aa, Artificial Sequence
  Description of Artificial Sequence: Synthetic peptide
HLWNWGILI

SEQ ID NO: 15167 - protein, 9 aa, Artificial Sequence
  Description of Artificial Sequence: Synthetic peptide
LLLYWGREL

SEQ ID NO: 15168 - protein, 10 aa, Artificial Sequence
  Description of Artificial Sequence: Synthetic peptide
TLWQRPLVTV

SEQ ID NO: 15169 - protein, 9 aa, Artificial Sequence
  Description of Artificial Sequence: Synthetic peptide
IVNQIIEQL

SEQ ID NO: 15170 - protein, 9 aa, Artificial Sequence
  Description of Artificial Sequence: Synthetic peptide
LLWKWGTLI

SEQ ID NO: 15171 - protein, 9 aa, Artificial Sequence
  Description of Artificial Sequence: Synthetic peptide
AILNIPVRI

SEQ ID NO: 15172 - protein, 9 aa, Artificial Sequence
  Description of Artificial Sequence: Synthetic peptide
TLTAQVRQL

SEQ ID NO: 15173 - protein, 9 aa, Artificial Sequence
  Description of Artificial Sequence: Synthetic peptide
HLWKWGTLI

SEQ ID NO: 15174 - protein, 9 aa, Artificial Sequence
  Description of Artificial Sequence: Synthetic peptide
TISSIFPQI

SEQ ID NO: 15175 - protein, 9 aa, Artificial Sequence
  Description of Artificial Sequence: Synthetic peptide
LVNQIIEQL

SEQ ID NO: 15176 - protein, 10 aa, Artificial Sequence
  Description of Artificial Sequence: Synthetic peptide
NLLDTIAIAV

SEQ ID NO: 15177 - protein, 9 aa, Artificial Sequence
  Description of Artificial Sequence: Synthetic peptide
AILNVPTRI

SEQ ID NO: 15178 - protein, 9 aa, Artificial Sequence
  Description of Artificial Sequence: Synthetic peptide
AIIVWTIVL

SEQ ID NO: 15179 - protein, 9 aa, Artificial Sequence
  Description of Artificial Sequence: Synthetic peptide
ALFYKLDVV

SEQ ID NO: 15180 - protein, 10 aa, Artificial Sequence
  Description of Artificial Sequence: Synthetic peptide
NLIDTVAIAV

SEQ ID NO: 15181 - protein, 9 aa, Artificial Sequence
  Description of Artificial Sequence: Synthetic peptide
TLTVQVRQL

SEQ ID NO: 15182 - protein, 9 aa, Artificial Sequence
  Description of Artificial Sequence: Synthetic peptide
IMAQLQPAL

SEQ ID NO: 15183 - protein, 9 aa, Artificial Sequence
  Description of Artificial Sequence: Synthetic peptide
HLEGKIILV

SEQ ID NO: 15184 - protein, 9 aa, Artificial Sequence
  Description of Artificial Sequence: Synthetic peptide
SALDLSFFL

SEQ ID NO: 15185 - protein, 9 aa, Artificial Sequence
  Description of Artificial Sequence: Synthetic peptide
VLVEPPVVL

SEQ ID NO: 15186 - protein, 9 aa, Artificial Sequence
  Description of Artificial Sequence: Synthetic peptide
ALTDIVPLT

SEQ ID NO: 15187 - protein, 9 aa, Artificial Sequence
  Description of Artificial Sequence: Synthetic peptide
VIWGKIPKF

SEQ ID NO: 15188 - protein, 10 aa, Artificial Sequence
  Description of Artificial Sequence: Synthetic peptide
TLWQRPIVKV

SEQ ID NO: 15189 - protein, 9 aa, Artificial Sequence
  Description of Artificial Sequence: Synthetic peptide
AIIGDIRQA

SEQ ID NO: 15190 - protein, 11 aa, Artificial Sequence
  Description of Artificial Sequence: Synthetic peptide
GLNTGEKDWQL

SEQ ID NO: 15191 - protein, 9 aa, Artificial Sequence
  Description of Artificial Sequence: Synthetic peptide
RAIEVVQRV

SEQ ID NO: 15192 - protein, 9 aa, Artificial Sequence
  Description of Artificial Sequence: Synthetic peptide
KLVPVDPAV

SEQ ID NO: 15193 - protein, 9 aa, Artificial Sequence
  Description of Artificial Sequence: Synthetic peptide
IVTDSQYAL

SEQ ID NO: 15194 - protein, 10 aa, Artificial Sequence
  Description of Artificial Sequence: Synthetic peptide
ALNPGLLETA

SEQ ID NO: 15195 - protein, 11 aa, Artificial Sequence
  Description of Artificial Sequence: Synthetic peptide
FLKEKGGLEGL

SEQ ID NO: 15196 - protein, 9 aa, Artificial Sequence
  Description of Artificial Sequence: Synthetic peptide
IIWGKIPKF

SEQ ID NO: 15197 - protein, 9 aa, Artificial Sequence
  Description of Artificial Sequence: Synthetic peptide
ALNPGLLET

SEQ ID NO: 15198 - protein, 9 aa, Artificial Sequence
  Description of Artificial Sequence: Synthetic peptide
LLQLTVWGI

SEQ ID NO: 15199 - protein, 9 aa, Artificial Sequence
  Description of Artificial Sequence: Synthetic peptide
HLLNWGFTT

SEQ ID NO: 15200 - protein, 9 aa, Artificial Sequence
  Description of Artificial Sequence: Synthetic peptide
AIIRILQQL

SEQ ID NO: 15201 - protein, 9 aa, Artificial Sequence
  Description of Artificial Sequence: Synthetic peptide
FQLPPLEGL

SEQ ID NO: 15202 - protein, 11 aa, Artificial Sequence
  Description of Artificial Sequence: Synthetic peptide
VQLGIPHPAGL

SEQ ID NO: 15203 - protein, 10 aa, Artificial Sequence
  Description of Artificial Sequence: Synthetic peptide
RTQDFWEVQL

SEQ ID NO: 15204 - protein, 9 aa, Artificial Sequence
  Description of Artificial Sequence: Synthetic peptide
ALQDSRPEV

SEQ ID NO: 15205 - protein, 9 aa, Artificial Sequence
  Description of Artificial Sequence: Synthetic peptide
TIVWSIVFI

SEQ ID NO: 15206 - protein, 10 aa, Artificial Sequence
  Description of Artificial Sequence: Synthetic peptide
YLRDQQLLGI

SEQ ID NO: 15207 - protein, 9 aa, Artificial Sequence
  Description of Artificial Sequence: Synthetic peptide
LLDTIAIAV

SEQ ID NO: 15208 - protein, 9 aa, Artificial Sequence
  Description of Artificial Sequence: Synthetic peptide
EGLKYLWNL

SEQ ID NO: 15209 - protein, 9 aa, Artificial Sequence
  Description of Artificial Sequence: Synthetic peptide
DLADHLIHL

SEQ ID NO: 15210 - protein, 9 aa, Artificial Sequence
  Description of Artificial Sequence: Synthetic peptide
TLRDVQAKL

SEQ ID NO: 15211 - protein, 10 aa, Artificial Sequence
  Description of Artificial Sequence: Synthetic peptide
KLVPVDPAVV

SEQ ID NO: 15212 - protein, 9 aa, Artificial Sequence
  Description of Artificial Sequence: Synthetic peptide
KLTPLCVTL

SEQ ID NO: 15213 - protein, 10 aa, Artificial Sequence
  Description of Artificial Sequence: Synthetic peptide
ILIAARTVEL

SEQ ID NO: 15214 - protein, 9 aa, Artificial Sequence
  Description of Artificial Sequence: Synthetic peptide
AVANWTDRV

SEQ ID NO: 15215 - protein, 9 aa, Artificial Sequence
  Description of Artificial Sequence: Synthetic peptide
AIIGDIRQA

SEQ ID NO: 15216 - protein, 9 aa, Artificial Sequence
  Description of Artificial Sequence: Synthetic peptide
RVIEIVQRA

SEQ ID NO: 15217 - protein, 9 aa, Artificial Sequence
  Description of Artificial Sequence: Synthetic peptide
SAINLIDTV

SEQ ID NO: 15218 - protein, 11 aa, Artificial Sequence
  Description of Artificial Sequence: Synthetic peptide
TQIDPDLADQL

SEQ ID NO: 15219 - protein, 9 aa, Artificial Sequence
  Description of Artificial Sequence: Synthetic peptide
QLTEVVQKI

SEQ ID NO: 15220 - protein, 11 aa, Artificial Sequence
  Description of Artificial Sequence: Synthetic peptide
TQIDPNTADHL

SEQ ID NO: 15221 - protein, 9 aa, Artificial Sequence
  Description of Artificial Sequence: Synthetic peptide
VVIQDNNEI

SEQ ID NO: 15222 - protein, 11 aa, Artificial Sequence
  Description of Artificial Sequence: Synthetic peptide
TQVDPDLADHL

SEQ ID NO: 15223 - protein, 9 aa, Artificial Sequence
  Description of Artificial Sequence: Synthetic peptide
EVIGDIRKA

SEQ ID NO: 15224 - protein, 9 aa, Artificial Sequence
  Description of Artificial Sequence: Synthetic peptide
VLAEAMSQA

SEQ ID NO: 15225 - protein, 9 aa, Artificial Sequence
  Description of Artificial Sequence: Synthetic peptide
IVNQIIEQL

SEQ ID NO: 15226 - protein, 9 aa, Artificial Sequence
  Description of Artificial Sequence: Synthetic peptide
SETETFRPA

SEQ ID NO: 15227 - protein, 9 aa, Artificial Sequence
  Description of Artificial Sequence: Synthetic peptide
RAIEVVQRV

SEQ ID NO: 15228 - protein, 9 aa, Artificial Sequence
  Description of Artificial Sequence: Synthetic peptide
AVLSIINRV

SEQ ID NO: 15229 - protein, 9 aa, Artificial Sequence
  Description of Artificial Sequence: Synthetic peptide
NETVPITCA

SEQ ID NO: 15230 - protein, 9 aa, Artificial Sequence
  Description of Artificial Sequence: Synthetic peptide
AVLSIVNRV

SEQ ID NO: 15231 - protein, 9 aa, Artificial Sequence
  Description of Artificial Sequence: Synthetic peptide
SISERILSA

SEQ ID NO: 15232 - protein, 9 aa, Artificial Sequence
  Description of Artificial Sequence: Synthetic peptide
SQQEIQQAA

SEQ ID NO: 15233 - protein, 9 aa, Artificial Sequence
  Description of Artificial Sequence: Synthetic peptide
AEWDRIHPP

SEQ ID NO: 15234 - protein, 9 aa, Artificial Sequence
  Description of Artificial Sequence: Synthetic peptide
SAINLLDTI

SEQ ID NO: 15235 - protein, 9 aa, Artificial Sequence
  Description of Artificial Sequence: Synthetic peptide
WTVNDIQKL

SEQ ID NO: 15236 - protein, 10 aa, Artificial Sequence
  Description of Artificial Sequence: Synthetic peptide
REFPSEQARA

SEQ ID NO: 15237 - protein, 9 aa, Artificial Sequence
  Description of Artificial Sequence: Synthetic peptide
ATLEEMMTA

SEQ ID NO: 15238 - protein, 9 aa, Artificial Sequence
  Description of Artificial Sequence: Synthetic peptide
GAASITLTV

SEQ ID NO: 15239 - protein, 9 aa, Artificial Sequence
  Description of Artificial Sequence: Synthetic peptide
IVTDSQYAL

SEQ ID NO: 15240 - protein, 9 aa, Artificial Sequence
  Description of Artificial Sequence: Synthetic peptide
NLIDTVAIA

SEQ ID NO: 15241 - protein, 9 aa, Artificial Sequence
  Description of Artificial Sequence: Synthetic peptide
SLFNTVATL

SEQ ID NO: 15242 - protein, 9 aa, Artificial Sequence
  Description of Artificial Sequence: Synthetic peptide
RVIEVAQRA

SEQ ID NO: 15243 - protein, 9 aa, Artificial Sequence
  Description of Artificial Sequence: Synthetic peptide
LVNQIIEQL

SEQ ID NO: 15244 - protein, 10 aa, Artificial Sequence
  Description of Artificial Sequence: Synthetic peptide
SQYALGIIQA

SEQ ID NO: 15245 - protein, 9 aa, Artificial Sequence
  Description of Artificial Sequence: Synthetic peptide
ATSTLQEQI

SEQ ID NO: 15246 - protein, 9 aa, Artificial Sequence
  Description of Artificial Sequence: Synthetic peptide
RAIEAQQHL

SEQ ID NO: 15247 - protein, 11 aa, Artificial Sequence
  Description of Artificial Sequence: Synthetic peptide
VVIQDNNEIKV

SEQ ID NO: 15248 - protein, 9 aa, Artificial Sequence
  Description of Artificial Sequence: Synthetic peptide
ASITLTVQV

SEQ ID NO: 15249 - protein, 9 aa, Artificial Sequence
  Description of Artificial Sequence: Synthetic peptide
STAGYREEL

SEQ ID NO: 15250 - protein, 9 aa, Artificial Sequence
  Description of Artificial Sequence: Synthetic peptide
SQIYPGIKV

SEQ ID NO: 15251 - protein, 9 aa, Artificial Sequence
  Description of Artificial Sequence: Synthetic peptide
FQLPPLEGL

SEQ ID NO: 15252 - protein, 9 aa, Artificial Sequence
  Description of Artificial Sequence: Synthetic peptide
TTSNLQEQI

SEQ ID NO: 15253 - protein, 9 aa, Artificial Sequence
  Description of Artificial Sequence: Synthetic peptide
ATGDIIGNI

SEQ ID NO: 15254 - protein, 9 aa, Artificial Sequence
  Description of Artificial Sequence: Synthetic peptide
AVANWTDRV

SEQ ID NO: 15255 - protein, 10 aa, Artificial Sequence
  Description of Artificial Sequence: Synthetic peptide
ASETETFRPA

SEQ ID NO: 15256 - protein, 9 aa, Artificial Sequence
  Description of Artificial Sequence: Synthetic peptide
IEVKDTKEA

SEQ ID NO: 15257 - protein, 9 aa, Artificial Sequence
  Description of Artificial Sequence: Synthetic peptide
FTSAAVKAA

SEQ ID NO: 15258 - protein, 9 aa, Artificial Sequence
  Description of Artificial Sequence: Synthetic peptide
ASITLTAQV

SEQ ID NO: 15259 - protein, 9 aa, Artificial Sequence
  Description of Artificial Sequence: Synthetic peptide
SEVGFPVRP

SEQ ID NO: 15260 - protein, 9 aa, Artificial Sequence
  Description of Artificial Sequence: Synthetic peptide
ILKEPVHGV

SEQ ID NO: 15261 - protein, 9 aa, Artificial Sequence
  Description of Artificial Sequence: Synthetic peptide
DIIGNIRQA

SEQ ID NO: 15262 - protein, 9 aa, Artificial Sequence
  Description of Artificial Sequence: Synthetic peptide
DIIGDIRQA

SEQ ID NO: 15263 - protein, 9 aa, Artificial Sequence
  Description of Artificial Sequence: Synthetic peptide
NAKNIIVQL

SEQ ID NO: 15264 - protein, 9 aa, Artificial Sequence
  Description of Artificial Sequence: Synthetic peptide
QLTEVVQKI

SEQ ID NO: 15265 - protein, 9 aa, Artificial Sequence
  Description of Artificial Sequence: Synthetic peptide
IQDNNEIKV

SEQ ID NO: 15266 - protein, 9 aa, Artificial Sequence
  Description of Artificial Sequence: Synthetic peptide
SAINLIDTV

SEQ ID NO: 15267 - protein, 9 aa, Artificial Sequence
  Description of Artificial Sequence: Synthetic peptide
IVTDSQYAL

SEQ ID NO: 15268 - protein, 9 aa, Artificial Sequence
  Description of Artificial Sequence: Synthetic peptide
AVLSIINRV

SEQ ID NO: 15269 - protein, 9 aa, Artificial Sequence
  Description of Artificial Sequence: Synthetic peptide
VVIQDNNEI

SEQ ID NO: 15270 - protein, 9 aa, Artificial Sequence
  Description of Artificial Sequence: Synthetic peptide
AVLSIVNRV

SEQ ID NO: 15271 - protein, 9 aa, Artificial Sequence
  Description of Artificial Sequence: Synthetic peptide
AIIGDIRQA

SEQ ID NO: 15272 - protein, 9 aa, Artificial Sequence
  Description of Artificial Sequence: Synthetic peptide
RAIEVVQRV

SEQ ID NO: 15273 - protein, 11 aa, Artificial Sequence
  Description of Artificial Sequence: Synthetic peptide
TQIDPDLADQL

SEQ ID NO: 15274 - protein, 9 aa, Artificial Sequence
  Description of Artificial Sequence: Synthetic peptide
RVIEIVQRA

SEQ ID NO: 15275 - protein, 9 aa, Artificial Sequence
  Description of Artificial Sequence: Synthetic peptide
SAINLLDTI

SEQ ID NO: 15276 - protein, 9 aa, Artificial Sequence
  Description of Artificial Sequence: Synthetic peptide
FQLPPLEGL

SEQ ID NO: 15277 - protein, 11 aa, Artificial Sequence
  Description of Artificial Sequence: Synthetic peptide
VVIQDNNEIKV

SEQ ID NO: 15278 - protein, 9 aa, Artificial Sequence
  Description of Artificial Sequence: Synthetic peptide
GGIGGFIKV

SEQ ID NO: 15279 - protein, 9 aa, Artificial Sequence
  Description of Artificial Sequence: Synthetic peptide
SQIYPGIKV

SEQ ID NO: 15280 - protein, 9 aa, Artificial Sequence
  Description of Artificial Sequence: Synthetic peptide
KLVPVDPAV

SEQ ID NO: 15281 - protein, 9 aa, Artificial Sequence
  Description of Artificial Sequence: Synthetic peptide
YSTQVDPDL

SEQ ID NO: 15282 - protein, 9 aa, Artificial Sequence
  Description of Artificial Sequence: Synthetic peptide
YSTQIDPDL

SEQ ID NO: 15283 - protein, 10 aa, Artificial Sequence
  Description of Artificial Sequence: Synthetic peptide
TVLDVGDAYF

SEQ ID NO: 15284 - protein, 9 aa, Artificial Sequence
  Description of Artificial Sequence: Synthetic peptide
VLAEAMSQA

SEQ ID NO: 15285 - protein, 10 aa, Artificial Sequence
  Description of Artificial Sequence: Synthetic peptide
GVIPLNLPQI

SEQ ID NO: 15286 - protein, 9 aa, Artificial Sequence
  Description of Artificial Sequence: Synthetic peptide
ASITLTVQV

SEQ ID NO: 15287 - protein, 9 aa, Artificial Sequence
  Description of Artificial Sequence: Synthetic peptide
GAASITLTV

SEQ ID NO: 15288 - protein, 11 aa, Artificial Sequence
  Description of Artificial Sequence: Synthetic peptide
TQVDPDLADHL

SEQ ID NO: 15289 - protein, 9 aa, Artificial Sequence
  Description of Artificial Sequence: Synthetic peptide
ASITLTAQV

SEQ ID NO: 15290 - protein, 9 aa, Artificial Sequence
  Description of Artificial Sequence: Synthetic peptide
IVNQIIEQL

SEQ ID NO: 15291 - protein, 9 aa, Artificial Sequence
  Description of Artificial Sequence: Synthetic peptide
ASDFNLPHI

SEQ ID NO: 15292 - protein, 9 aa, Artificial Sequence
  Description of Artificial Sequence: Synthetic peptide
SLAEEDIRI

SEQ ID NO: 15293 - protein, 9 aa, Artificial Sequence
  Description of Artificial Sequence: Synthetic peptide
LLDTIAIAV

SEQ ID NO: 15294 - protein, 9 aa, Artificial Sequence
  Description of Artificial Sequence: Synthetic peptide
YVDRFFKTL

SEQ ID NO: 15295 - protein, 9 aa, Artificial Sequence
  Description of Artificial Sequence: Synthetic peptide
LIDTVAIAV

SEQ ID NO: 15296 - protein, 9 aa, Artificial Sequence
  Description of Artificial Sequence: Synthetic peptide
FDPWVGDNL

SEQ ID NO: 15297 - protein, 9 aa, Artificial Sequence
  Description of Artificial Sequence: Synthetic peptide
FDPWIGDNL

SEQ ID NO: 15298 - protein, 9 aa, Artificial Sequence
  Description of Artificial Sequence: Synthetic peptide
FDPWVGNNL

SEQ ID NO: 15299 - protein, 9 aa, Artificial Sequence
  Description of Artificial Sequence: Synthetic peptide
AVLSIINRV

SEQ ID NO: 15300 - protein, 9 aa, Artificial Sequence
  Description of Artificial Sequence: Synthetic peptide
AVLSIVNRV

SEQ ID NO: 15301 - protein, 9 aa, Artificial Sequence
  Description of Artificial Sequence: Synthetic peptide
QLTEVVQKI

SEQ ID NO: 15302 - protein, 10 aa, Artificial Sequence
  Description of Artificial Sequence: Synthetic peptide
TLWQRPLVTV

SEQ ID NO: 15303 - protein, 9 aa, Artificial Sequence
  Description of Artificial Sequence: Synthetic peptide
ILKEPVHGV

SEQ ID NO: 15304 - protein, 10 aa, Artificial Sequence
  Description of Artificial Sequence: Synthetic peptide
TLWQRPIVKV

SEQ ID NO: 15305 - protein, 9 aa, Artificial Sequence
  Description of Artificial Sequence: Synthetic peptide
FSPEVIPMF

SEQ ID NO: 15306 - protein, 9 aa, Artificial Sequence
  Description of Artificial Sequence: Synthetic peptide
VIPLNLPQI

SEQ ID NO: 15307 - protein, 9 aa, Artificial Sequence
  Description of Artificial Sequence: Synthetic peptide
HLEGKIILV

SEQ ID NO: 15308 - protein, 9 aa, Artificial Sequence
  Description of Artificial Sequence: Synthetic peptide
RVIEIVQRA

SEQ ID NO: 15309 - protein, 9 aa, Artificial Sequence
  Description of Artificial Sequence: Synthetic peptide
AIIGDIRQA

SEQ ID NO: 15310 - protein, 10 aa, Artificial Sequence
  Description of Artificial Sequence: Synthetic peptide
KIIGQVGDQA

SEQ ID NO: 15311 - protein, 9 aa, Artificial Sequence
  Description of Artificial Sequence: Synthetic peptide
KVITLTETT

SEQ ID NO: 15312 - protein, 9 aa, Artificial Sequence
  Description of Artificial Sequence: Synthetic peptide
AVLSIINRV

SEQ ID NO: 15313 - protein, 9 aa, Artificial Sequence
  Description of Artificial Sequence: Synthetic peptide
IVNQIIEQL

SEQ ID NO: 15314 - protein, 9 aa, Artificial Sequence
  Description of Artificial Sequence: Synthetic peptide
VVIQDNNEI

SEQ ID NO: 15315 - protein, 9 aa, Artificial Sequence
  Description of Artificial Sequence: Synthetic peptide
WTVNDIQKL

SEQ ID NO: 15316 - protein, 9 aa, Artificial Sequence
  Description of Artificial Sequence: Synthetic peptide
SETETFRPA

SEQ ID NO: 15317 - protein, 9 aa, Artificial Sequence
  Description of Artificial Sequence: Synthetic peptide
EVIGDIRKA

SEQ ID NO: 15318 - protein, 9 aa, Artificial Sequence
  Description of Artificial Sequence: Synthetic peptide
QLTEVVQKI

SEQ ID NO: 15319 - protein, 9 aa, Artificial Sequence
  Description of Artificial Sequence: Synthetic peptide
AIIRILQQL

SEQ ID NO: 15320 - protein, 9 aa, Artificial Sequence
  Description of Artificial Sequence: Synthetic peptide
VLAEAMSQA

SEQ ID NO: 15321 - protein, 9 aa, Artificial Sequence
  Description of Artificial Sequence: Synthetic peptide
AVLSIVNRV

SEQ ID NO: 15322 - protein, 10 aa, Artificial Sequence
  Description of Artificial Sequence: Synthetic peptide
REFPSEQARA

SEQ ID NO: 15323 - protein, 10 aa, Artificial Sequence
  Description of Artificial Sequence: Synthetic peptide
AVVIQDNNEI

SEQ ID NO: 15324 - protein, 10 aa, Artificial Sequence
  Description of Artificial Sequence: Synthetic peptide
KAYSTESHNV

SEQ ID NO: 15325 - protein, 9 aa, Artificial Sequence
  Description of Artificial Sequence: Synthetic peptide
RVIEVAQRA

SEQ ID NO: 15326 - protein, 9 aa, Artificial Sequence
  Description of Artificial Sequence: Synthetic peptide
RAIEVVQRV

SEQ ID NO: 15327 - protein, 9 aa, Artificial Sequence
  Description of Artificial Sequence: Synthetic peptide
NETVPITCA

SEQ ID NO: 15328 - protein, 9 aa, Artificial Sequence
  Description of Artificial Sequence: Synthetic peptide
GTAGSTMGA

SEQ ID NO: 15329 - protein, 10 aa, Artificial Sequence
  Description of Artificial Sequence: Synthetic peptide
RVLAEAMSQA

SEQ ID NO: 15330 - protein, 11 aa, Artificial Sequence
  Description of Artificial Sequence: Synthetic peptide
TQIDPNTADHL

SEQ ID NO: 15331 - protein, 9 aa, Artificial Sequence
  Description of Artificial Sequence: Synthetic peptide
IEVKDTKEA

SEQ ID NO: 15332 - protein, 9 aa, Artificial Sequence
  Description of Artificial Sequence: Synthetic peptide
KIITLTETT

SEQ ID NO: 15333 - protein, 9 aa, Artificial Sequence
  Description of Artificial Sequence: Synthetic peptide
ILKEPVHGV

SEQ ID NO: 15334 - protein, 9 aa, Artificial Sequence
  Description of Artificial Sequence: Synthetic peptide
KIGGQLIEA

SEQ ID NO: 15335 - protein, 9 aa, Artificial Sequence
  Description of Artificial Sequence: Synthetic peptide
ALIRILQQL

SEQ ID NO: 15336 - protein, 9 aa, Artificial Sequence
  Description of Artificial Sequence: Synthetic peptide
KQMAGGDCV

SEQ ID NO: 15337 - protein, 9 aa, Artificial Sequence
  Description of Artificial Sequence: Synthetic peptide
QIYPGIKVK

SEQ ID NO: 15338 - protein, 9 aa, Artificial Sequence
  Description of Artificial Sequence: Synthetic peptide
AMYSPPIAR

SEQ ID NO: 15339 - protein, 9 aa, Artificial Sequence
  Description of Artificial Sequence: Synthetic peptide
ALATPTKAK

SEQ ID NO: 15340 - protein, 9 aa, Artificial Sequence
  Description of Artificial Sequence: Synthetic peptide
KLQEYFINK

SEQ ID NO: 15341 - protein, 9 aa, Artificial Sequence
  Description of Artificial Sequence: Synthetic peptide
GLFNNSILK

SEQ ID NO: 15342 - protein, 9 aa, Artificial Sequence
  Description of Artificial Sequence: Synthetic peptide
AAAAIMMQK

SEQ ID NO: 15343 - protein, 9 aa, Artificial Sequence
  Description of Artificial Sequence: Synthetic peptide
QIYPGIKIK

SEQ ID NO: 15344 - protein, 9 aa, Artificial Sequence
  Description of Artificial Sequence: Synthetic peptide
SGATIMMQK

SEQ ID NO: 15345 - protein, 10 aa, Artificial Sequence
  Description of Artificial Sequence: Synthetic peptide
ASGATIMMQK

SEQ ID NO: 15346 - protein, 9 aa, Artificial Sequence
  Description of Artificial Sequence: Synthetic peptide
AIFQSSMTK

SEQ ID NO: 15347 - protein, 9 aa, Artificial Sequence
  Description of Artificial Sequence: Synthetic peptide
SLFGNDQSK

SEQ ID NO: 15348 - protein, 9 aa, Artificial Sequence
  Description of Artificial Sequence: Synthetic peptide
KILEPSRTK

SEQ ID NO: 15349 - protein, 10 aa, Artificial Sequence
  Description of Artificial Sequence: Synthetic peptide
AAAAAIMMQK

SEQ ID NO: 15350 - protein, 9 aa, Artificial Sequence
  Description of Artificial Sequence: Synthetic peptide
QIYPGIKVR

SEQ ID NO: 15351 - protein, 9 aa, Artificial Sequence
  Description of Artificial Sequence: Synthetic peptide
LLNGSLAEK

SEQ ID NO: 15352 - protein, 10 aa, Artificial Sequence
  Description of Artificial Sequence: Synthetic peptide
GAAAAIMMQK

SEQ ID NO: 15353 - protein, 11 aa, Artificial Sequence
  Description of Artificial Sequence: Synthetic peptide
TVNDIQKLVGK

SEQ ID NO: 15354 - protein, 9 aa, Artificial Sequence
  Description of Artificial Sequence: Synthetic peptide
STIKQACPK

SEQ ID NO: 15355 - protein, 11 aa, Artificial Sequence
  Description of Artificial Sequence: Synthetic peptide
TVNDIQKLVGK

SEQ ID NO: 15356 - protein, 10 aa, Artificial Sequence
  Description of Artificial Sequence: Synthetic peptide
TVQPIQLPNK

SEQ ID NO: 15357 - protein, 9 aa, Artificial Sequence
  Description of Artificial Sequence: Synthetic peptide
KLQEYFINK

SEQ ID NO: 15358 - protein, 9 aa, Artificial Sequence
  Description of Artificial Sequence: Synthetic peptide
QIYPGIKVK

SEQ ID NO: 15359 - protein, 10 aa, Artificial Sequence
  Description of Artificial Sequence: Synthetic peptide
TVQPIQLPEK

SEQ ID NO: 15360 - protein, 9 aa, Artificial Sequence
  Description of Artificial Sequence: Synthetic peptide
SLFGNDQSK

SEQ ID NO: 15361 - protein, 9 aa, Artificial Sequence
  Description of Artificial Sequence: Synthetic peptide
ALATPTKAK

SEQ ID NO: 15362 - protein, 9 aa, Artificial Sequence
  Description of Artificial Sequence: Synthetic peptide
AMYSPPIAR

SEQ ID NO: 15363 - protein, 9 aa, Artificial Sequence
  Description of Artificial Sequence: Synthetic peptide
GLDGLVYSK

SEQ ID NO: 15364 - protein, 11 aa, Artificial Sequence
  Description of Artificial Sequence: Synthetic peptide
QASGATIMMQK

SEQ ID NO: 15365 - protein, 9 aa, Artificial Sequence
  Description of Artificial Sequence: Synthetic peptide
AAAAIMMQK

SEQ ID NO: 15366 - protein, 9 aa, Artificial Sequence
  Description of Artificial Sequence: Synthetic peptide
SGATIMMQK

SEQ ID NO: 15367 - protein, 9 aa, Artificial Sequence
  Description of Artificial Sequence: Synthetic peptide
IIASDIQTK

SEQ ID NO: 15368 - protein, 9 aa, Artificial Sequence
  Description of Artificial Sequence: Synthetic peptide
LLNGSLAEK

SEQ ID NO: 15369 - protein, 9 aa, Artificial Sequence
  Description of Artificial Sequence: Synthetic peptide
AIFQSSMTK

SEQ ID NO: 15370 - protein, 9 aa, Artificial Sequence
  Description of Artificial Sequence: Synthetic peptide
GLDGLIYSK

SEQ ID NO: 15371 - protein, 10 aa, Artificial Sequence
  Description of Artificial Sequence: Synthetic peptide
TVQPIQLPDK

SEQ ID NO: 15372 - protein, 10 aa, Artificial Sequence
  Description of Artificial Sequence: Synthetic peptide
ASGATIMMQK

SEQ ID NO: 15373 - protein, 10 aa, Artificial Sequence
  Description of Artificial Sequence: Synthetic peptide
GSNFTSAAVK

SEQ ID NO: 15374 - protein, 9 aa, Artificial Sequence
  Description of Artificial Sequence: Synthetic peptide
APGGFAILK

SEQ ID NO: 15375 - protein, 9 aa, Artificial Sequence
  Description of Artificial Sequence: Synthetic peptide
GLFNNSILK

SEQ ID NO: 15376 - protein, 10 aa, Artificial Sequence
  Description of Artificial Sequence: Synthetic peptide
KSLFGNDQSK

SEQ ID NO: 15377 - protein, 11 aa, Artificial Sequence
  Description of Artificial Sequence: Synthetic peptide
QVYQEPYKNLK

SEQ ID NO: 15378 - protein, 10 aa, Artificial Sequence
  Description of Artificial Sequence: Synthetic peptide
SQQEIQQAAK

SEQ ID NO: 15379 - protein, 9 aa, Artificial Sequence
  Description of Artificial Sequence: Synthetic peptide
APAGFAILK

SEQ ID NO: 15380 - protein, 10 aa, Artificial Sequence
  Description of Artificial Sequence: Synthetic peptide
AAAAAIMMQK

SEQ ID NO: 15381 - protein, 11 aa, Artificial Sequence
  Description of Artificial Sequence: Synthetic peptide
SGAAAAIMMQK

SEQ ID NO: 15382 - protein, 11 aa, Artificial Sequence
  Description of Artificial Sequence: Synthetic peptide
GAAAAAIMMQK

SEQ ID NO: 15383 - protein, 9 aa, Artificial Sequence
  Description of Artificial Sequence: Synthetic peptide
KILEPSRTK

SEQ ID NO: 15384 - protein, 10 aa, Artificial Sequence
  Description of Artificial Sequence: Synthetic peptide
QVGDQAEHLK

SEQ ID NO: 15385 - protein, 10 aa, Artificial Sequence
  Description of Artificial Sequence: Synthetic peptide
GAAAAIMMQK

SEQ ID NO: 15386 - protein, 9 aa, Artificial Sequence
  Description of Artificial Sequence: Synthetic peptide
KQLTEVVQK

SEQ ID NO: 15387 - protein, 11 aa, Artificial Sequence
  Description of Artificial Sequence: Synthetic peptide
QSQGVVESMNK

SEQ ID NO: 15388 - protein, 9 aa, Artificial Sequence
  Description of Artificial Sequence: Synthetic peptide
ALQVCFLNK

SEQ ID NO: 15389 - protein, 9 aa, Artificial Sequence
  Description of Artificial Sequence: Synthetic peptide
GIIQAQPNK

SEQ ID NO: 15390 - protein, 10 aa, Artificial Sequence
  Description of Artificial Sequence: Synthetic peptide
GGLDGLVYSK

SEQ ID NO: 15391 - protein, 9 aa, Artificial Sequence
  Description of Artificial Sequence: Synthetic peptide
STIKQACPK

SEQ ID NO: 15392 - protein, 9 aa, Artificial Sequence
  Description of Artificial Sequence: Synthetic peptide
QIYPGIKIK

SEQ ID NO: 15393 - protein, 10 aa, Artificial Sequence
  Description of Artificial Sequence: Synthetic peptide
GSQPTTPCNK

SEQ ID NO: 15394 - protein, 11 aa, Artificial Sequence
  Description of Artificial Sequence: Synthetic peptide
TTGEVIGDIRK

SEQ ID NO: 15395 - protein, 10 aa, Artificial Sequence
  Description of Artificial Sequence: Synthetic peptide
ATESIVIWGK

SEQ ID NO: 15396 - protein, 10 aa, Artificial Sequence
  Description of Artificial Sequence: Synthetic peptide
VVESMNKELK

SEQ ID NO: 15397 - protein, 9 aa, Artificial Sequence
  Description of Artificial Sequence: Synthetic peptide
AAAAIMMQK

SEQ ID NO: 15398 - protein, 9 aa, Artificial Sequence
  Description of Artificial Sequence: Synthetic peptide
SGATIMMQK

SEQ ID NO: 15399 - protein, 10 aa, Artificial Sequence
  Description of Artificial Sequence: Synthetic peptide
ASGATIMMQK

SEQ ID NO: 15400 - protein, 9 aa, Artificial Sequence
  Description of Artificial Sequence: Synthetic peptide
QIYPGIKVK

SEQ ID NO: 15401 - protein, 9 aa, Artificial Sequence
  Description of Artificial Sequence: Synthetic peptide
KLQEYFINK

SEQ ID NO: 15402 - protein, 9 aa, Artificial Sequence
  Description of Artificial Sequence: Synthetic peptide
AMYSPPIAR

SEQ ID NO: 15403 - protein, 9 aa, Artificial Sequence
  Description of Artificial Sequence: Synthetic peptide
GSLQYLASK

SEQ ID NO: 15404 - protein, 11 aa, Artificial Sequence
  Description of Artificial Sequence: Synthetic peptide
QASGATIMMQK

SEQ ID NO: 15405 - protein, 10 aa, Artificial Sequence
  Description of Artificial Sequence: Synthetic peptide
AAAAAIMMQK

SEQ ID NO: 15406 - protein, 9 aa, Artificial Sequence
  Description of Artificial Sequence: Synthetic peptide
STIKQACPK

SEQ ID NO: 15407 - protein, 11 aa, Artificial Sequence
  Description of Artificial Sequence: Synthetic peptide
TVNDIQKLVGK

SEQ ID NO: 15408 - protein, 10 aa, Artificial Sequence
  Description of Artificial Sequence: Synthetic peptide
TVQPIQLPNK

SEQ ID NO: 15409 - protein, 9 aa, Artificial Sequence
  Description of Artificial Sequence: Synthetic peptide
APAGFAILK

SEQ ID NO: 15410 - protein, 9 aa, Artificial Sequence
  Description of Artificial Sequence: Synthetic peptide
APGGFAILK

SEQ ID NO: 15411 - protein, 10 aa, Artificial Sequence
  Description of Artificial Sequence: Synthetic peptide
TVQPIQLPEK

SEQ ID NO: 15412 - protein, 11 aa, Artificial Sequence
  Description of Artificial Sequence: Synthetic peptide
GAAAAAIMMQK

SEQ ID NO: 15413 - protein, 11 aa, Artificial Sequence
  Description of Artificial Sequence: Synthetic peptide
SGAAAAIMMQK

SEQ ID NO: 15414 - protein, 9 aa, Artificial Sequence
  Description of Artificial Sequence: Synthetic peptide
ATLYCVHQK

SEQ ID NO: 15415 - protein, 10 aa, Artificial Sequence
  Description of Artificial Sequence: Synthetic peptide
GAAAAIMMQK

SEQ ID NO: 15416 - protein, 9 aa, Artificial Sequence
  Description of Artificial Sequence: Synthetic peptide
GIIQAQPNK

SEQ ID NO: 15417 - protein, 10 aa, Artificial Sequence
  Description of Artificial Sequence: Synthetic peptide
GSNFTSAAVK

SEQ ID NO: 15418 - protein, 10 aa, Artificial Sequence
  Description of Artificial Sequence: Synthetic peptide
GGLDGLVYSK

SEQ ID NO: 15419 - protein, 9 aa, Artificial Sequence
  Description of Artificial Sequence: Synthetic peptide
GLFNNSILK

SEQ ID NO: 15420 - protein, 10 aa, Artificial Sequence
  Description of Artificial Sequence: Synthetic peptide
GGLDGLIYSK

SEQ ID NO: 15421 - protein, 11 aa, Artificial Sequence
  Description of Artificial Sequence: Synthetic peptide
TTGEVIGDIRK

SEQ ID NO: 15422 - protein, 9 aa, Artificial Sequence
  Description of Artificial Sequence: Synthetic peptide
QIYPGIKIK

SEQ ID NO: 15423 - protein, 9 aa, Artificial Sequence
  Description of Artificial Sequence: Synthetic peptide
AIFQSSMTK

SEQ ID NO: 15424 - protein, 9 aa, Artificial Sequence
  Description of Artificial Sequence: Synthetic peptide
GSLQYLALK

SEQ ID NO: 15425 - protein, 10 aa, Artificial Sequence
  Description of Artificial Sequence: Synthetic peptide
KSLFGNDQSK

SEQ ID NO: 15426 - protein, 9 aa, Artificial Sequence
  Description of Artificial Sequence: Synthetic peptide
SLFGNDQSK

SEQ ID NO: 15427 - protein, 10 aa, Artificial Sequence
  Description of Artificial Sequence: Synthetic peptide
ATGDIIGNIR

SEQ ID NO: 15428 - protein, 10 aa, Artificial Sequence
  Description of Artificial Sequence: Synthetic peptide
ATESIVIWGK

SEQ ID NO: 15429 - protein, 9 aa, Artificial Sequence
  Description of Artificial Sequence: Synthetic peptide
ALATPTKAK

SEQ ID NO: 15430 - protein, 10 aa, Artificial Sequence
  Description of Artificial Sequence: Synthetic peptide
SQQEIQQAAK

SEQ ID NO: 15431 - protein, 10 aa, Artificial Sequence
  Description of Artificial Sequence: Synthetic peptide
STDHQNPVRK

SEQ ID NO: 15432 - protein, 8 aa, Artificial Sequence
  Description of Artificial Sequence: Synthetic peptide
AAAIMMQK

SEQ ID NO: 15433 - protein, 8 aa, Artificial Sequence
  Description of Artificial Sequence: Synthetic peptide
PGGFAILK

SEQ ID NO: 15434 - protein, 9 aa, Artificial Sequence
  Description of Artificial Sequence: Synthetic peptide
QIIEQLIKK

SEQ ID NO: 15435 - protein, 9 aa, Artificial Sequence
  Description of Artificial Sequence: Synthetic peptide
KQLTEVVQK

SEQ ID NO: 15436 - protein, 10 aa, Artificial Sequence
  Description of Artificial Sequence: Synthetic peptide
QVGDQAEHLK

SEQ ID NO: 15437 - protein, 10 aa, Artificial Sequence
  Description of Artificial Sequence: Synthetic peptide
ATEGIVIWGK

SEQ ID NO: 15438 - protein, 10 aa, Artificial Sequence
  Description of Artificial Sequence: Synthetic peptide
SQIYPGIKVK

SEQ ID NO: 15439 - protein, 9 aa, Artificial Sequence
  Description of Artificial Sequence: Synthetic peptide
GTNETEIFR

SEQ ID NO: 15440 - protein, 9 aa, Artificial Sequence
  Description of Artificial Sequence: Synthetic peptide
IIASDIQTK

SEQ ID NO: 15441 - protein, 10 aa, Artificial Sequence
  Description of Artificial Sequence: Synthetic peptide
ITLTETTNQK

SEQ ID NO: 15442 - protein, 9 aa, Artificial Sequence
  Description of Artificial Sequence: Synthetic peptide
KILEPSRTK

SEQ ID NO: 15443 - protein, 11 aa, Artificial Sequence
  Description of Artificial Sequence: Synthetic peptide
GVVESMNKELK

SEQ ID NO: 15444 - protein, 9 aa, Artificial Sequence
  Description of Artificial Sequence: Synthetic peptide
KSLGVAPTR

SEQ ID NO: 15445 - protein, 11 aa, Artificial Sequence
  Description of Artificial Sequence: Synthetic peptide
QVYQEPYKNLK

SEQ ID NO: 15446 - protein, 9 aa, Artificial Sequence
  Description of Artificial Sequence: Synthetic peptide
GLDGLIYSK

SEQ ID NO: 15447 - protein, 11 aa, Artificial Sequence
  Description of Artificial Sequence: Synthetic peptide
TVLEGINLPGK

SEQ ID NO: 15448 - protein, 9 aa, Artificial Sequence
  Description of Artificial Sequence: Synthetic peptide
QIYPGIKVR

SEQ ID NO: 15449 - protein, 11 aa, Artificial Sequence
  Description of Artificial Sequence: Synthetic peptide
STYWGLNTGEK

SEQ ID NO: 15450 - protein, 9 aa, Artificial Sequence
  Description of Artificial Sequence: Synthetic peptide
GLDGLVYSK

SEQ ID NO: 15451 - protein, 10 aa, Artificial Sequence
  Description of Artificial Sequence: Synthetic peptide
ATEGIIIWGK

SEQ ID NO: 15452 - protein, 9 aa, Artificial Sequence
  Description of Artificial Sequence: Synthetic peptide
IYNNKNITF

SEQ ID NO: 15453 - protein, 9 aa, Artificial Sequence
  Description of Artificial Sequence: Synthetic peptide
NYTQQIYTL

SEQ ID NO: 15454 - protein, 9 aa, Artificial Sequence
  Description of Artificial Sequence: Synthetic peptide
YFINKSIEF

SEQ ID NO: 15455 - protein, 9 aa, Artificial Sequence
  Description of Artificial Sequence: Synthetic peptide
NYTQQIYSL

SEQ ID NO: 15456 - protein, 9 aa, Artificial Sequence
  Description of Artificial Sequence: Synthetic peptide
NYTQHIYSL

SEQ ID NO: 15457 - protein, 9 aa, Artificial Sequence
  Description of Artificial Sequence: Synthetic peptide
NYTYHIYSL

SEQ ID NO: 15458 - protein, 9 aa, Artificial Sequence
  Description of Artificial Sequence: Synthetic peptide
RWADITQEF

SEQ ID NO: 15459 - protein, 9 aa, Artificial Sequence
  Description of Artificial Sequence: Synthetic peptide
VYQEPYKNL

SEQ ID NO: 15460 - protein, 9 aa, Artificial Sequence
  Description of Artificial Sequence: Synthetic peptide
RYLKDQQLL

SEQ ID NO: 15461 - protein, 10 aa, Artificial Sequence
  Description of Artificial Sequence: Synthetic peptide
EYFINKSIEF

SEQ ID NO: 15462 - protein, 9 aa, Artificial Sequence
  Description of Artificial Sequence: Synthetic peptide
AFLNIPTRI

SEQ ID NO: 15463 - protein, 9 aa, Artificial Sequence
  Description of Artificial Sequence: Synthetic peptide
RYLRDQQLL

SEQ ID NO: 15464 - protein, 9 aa, Artificial Sequence
  Description of Artificial Sequence: Synthetic peptide
VWTIVLVQY

SEQ ID NO: 15465 - protein, 9 aa, Artificial Sequence
  Description of Artificial Sequence: Synthetic peptide
IYQEPYKNL

SEQ ID NO: 15466 - protein, 9 aa, Artificial Sequence
  Description of Artificial Sequence: Synthetic peptide
IYNNKNITF

SEQ ID NO: 15467 - protein, 9 aa, Artificial Sequence
  Description of Artificial Sequence: Synthetic peptide
NYTQQIYTL

SEQ ID NO: 15468 - protein, 9 aa, Artificial Sequence
  Description of Artificial Sequence: Synthetic peptide
YFINKSIEF

SEQ ID NO: 15469 - protein, 9 aa, Artificial Sequence
  Description of Artificial Sequence: Synthetic peptide
NYTQQIYSL

SEQ ID NO: 15470 - protein, 9 aa, Artificial Sequence
  Description of Artificial Sequence: Synthetic peptide
RWADITQEF

SEQ ID NO: 15471 - protein, 9 aa, Artificial Sequence
  Description of Artificial Sequence: Synthetic peptide
NYTQHIYSL

SEQ ID NO: 15472 - protein, 9 aa, Artificial Sequence
  Description of Artificial Sequence: Synthetic peptide
VYQEPYKNL

SEQ ID NO: 15473 - protein, 9 aa, Artificial Sequence
  Description of Artificial Sequence: Synthetic peptide
RYLKDQQLL

SEQ ID NO: 15474 - protein, 9 aa, Artificial Sequence
  Description of Artificial Sequence: Synthetic peptide
YYDPSKELI

SEQ ID NO: 15475 - protein, 10 aa, Artificial Sequence
  Description of Artificial Sequence: Synthetic peptide
EYFINKSIEF

SEQ ID NO: 15476 - protein, 9 aa, Artificial Sequence
  Description of Artificial Sequence: Synthetic peptide
IYQEPYKNL

SEQ ID NO: 15477 - protein, 9 aa, Artificial Sequence
  Description of Artificial Sequence: Synthetic peptide
IYNTYGDTW

SEQ ID NO: 15478 - protein, 9 aa, Artificial Sequence
  Description of Artificial Sequence: Synthetic peptide
RYLRDQQLL

SEQ ID NO: 15479 - protein, 9 aa, Artificial Sequence
  Description of Artificial Sequence: Synthetic peptide
YYDPSKDLI

SEQ ID NO: 15480 - protein, 10 aa, Artificial Sequence
  Description of Artificial Sequence: Synthetic peptide
DTIAIAVANW

SEQ ID NO: 15481 - protein, 10 aa, Artificial Sequence
  Description of Artificial Sequence: Synthetic peptide
EVQKQGLGQW

SEQ ID NO: 15482 - protein, 10 aa, Artificial Sequence
  Description of Artificial Sequence: Synthetic peptide
DTVAIAVANW

SEQ ID NO: 15483 - protein, 10 aa, Artificial Sequence
  Description of Artificial Sequence: Synthetic peptide
ETINDEAAEW

SEQ ID NO: 15484 - protein, 10 aa, Artificial Sequence
  Description of Artificial Sequence: Synthetic peptide
DTINEEAAEW

SEQ ID NO: 15485 - protein, 10 aa, Artificial Sequence
  Description of Artificial Sequence: Synthetic peptide
DTINDEAAEW

SEQ ID NO: 15486 - protein, 10 aa, Artificial Sequence
  Description of Artificial Sequence: Synthetic peptide
EVQKQGPGQW

SEQ ID NO: 15487 - protein, 9 aa, Artificial Sequence
  Description of Artificial Sequence: Synthetic peptide
EVIPMFSAL

SEQ ID NO: 15488 - protein, 9 aa, Artificial Sequence
  Description of Artificial Sequence: Synthetic peptide
EVIPMFTAL

SEQ ID NO: 15489 - protein, 10 aa, Artificial Sequence
  Description of Artificial Sequence: Synthetic peptide
EVQKQEQGQW

SEQ ID NO: 15490 - protein, 10 aa, Artificial Sequence
  Description of Artificial Sequence: Synthetic peptide
EQATQEVKSW

SEQ ID NO: 15491 - protein, 9 aa, Artificial Sequence
  Description of Artificial Sequence: Synthetic peptide
DVQAKLQEY

SEQ ID NO: 15492 - protein, 9 aa, Artificial Sequence
  Description of Artificial Sequence: Synthetic peptide
NVTENFNVW

SEQ ID NO: 15493 - protein, 9 aa, Artificial Sequence
  Description of Artificial Sequence: Synthetic peptide
TVAIAVANW

SEQ ID NO: 15494 - protein, 9 aa, Artificial Sequence
  Description of Artificial Sequence: Synthetic peptide
STVGSTAGY

SEQ ID NO: 15495 - protein, 9 aa, Artificial Sequence
  Description of Artificial Sequence: Synthetic peptide
DIAGATSTL

SEQ ID NO: 15496 - protein, 10 aa, Artificial Sequence
  Description of Artificial Sequence: Synthetic peptide
EQATQEVKGW

SEQ ID NO: 15497 - protein, 9 aa, Artificial Sequence
  Description of Artificial Sequence: Synthetic peptide
ENNGTNSTW

SEQ ID NO: 15498 - protein, 9 aa, Artificial Sequence
  Description of Artificial Sequence: Synthetic peptide
DIAGTTSTL

SEQ ID NO: 15499 - protein, 10 aa, Artificial Sequence
  Description of Artificial Sequence: Synthetic peptide
EVQKQGPDQW

SEQ ID NO: 15500 - protein, 9 aa, Artificial Sequence
  Description of Artificial Sequence: Synthetic peptide
EVIGDIRKA

SEQ ID NO: 15501 - protein, 9 aa, Artificial Sequence
  Description of Artificial Sequence: Synthetic peptide
NVTENFNMW

SEQ ID NO: 15502 - protein, 10 aa, Artificial Sequence
  Description of Artificial Sequence: Synthetic peptide
SVAIGPGQAF

SEQ ID NO: 15503 - protein, 11 aa, Artificial Sequence
  Description of Artificial Sequence: Synthetic peptide
SVLSGGKLDSW

SEQ ID NO: 15504 - protein, 9 aa, Artificial Sequence
  Description of Artificial Sequence: Synthetic peptide
DAKLVVSTY

SEQ ID NO: 15505 - protein, 10 aa, Artificial Sequence
  Description of Artificial Sequence: Synthetic peptide
EVNIVTDSQY

SEQ ID NO: 15506 - protein, 9 aa, Artificial Sequence
  Description of Artificial Sequence: Synthetic peptide
STVGSTAGY

SEQ ID NO: 15507 - protein, 9 aa, Artificial Sequence
  Description of Artificial Sequence: Synthetic peptide
EVIGDIRKA

SEQ ID NO: 15508 - protein, 9 aa, Artificial Sequence
  Description of Artificial Sequence: Synthetic peptide
DVQAKLQEY

SEQ ID NO: 15509 - protein, 10 aa, Artificial Sequence
  Description of Artificial Sequence: Synthetic peptide
EVNIVTDSQY

SEQ ID NO: 15510 - protein, 9 aa, Artificial Sequence
  Description of Artificial Sequence: Synthetic peptide
EVIPMFSAL

SEQ ID NO: 15511 - protein, 9 aa, Artificial Sequence
  Description of Artificial Sequence: Synthetic peptide
EVIPMFTAL

SEQ ID NO: 15512 - protein, 9 aa, Artificial Sequence
  Description of Artificial Sequence: Synthetic peptide
ETKLGKAGY

SEQ ID NO: 15513 - protein, 9 aa, Artificial Sequence
  Description of Artificial Sequence: Synthetic peptide
ETPGIRYQY

SEQ ID NO: 15514 - protein, 9 aa, Artificial Sequence
  Description of Artificial Sequence: Synthetic peptide
EIVSPRCEY

SEQ ID NO: 15515 - protein, 9 aa, Artificial Sequence
  Description of Artificial Sequence: Synthetic peptide
STRNITEEY

SEQ ID NO: 15516 - protein, 8 aa, Artificial Sequence
  Description of Artificial Sequence: Synthetic peptide
DVVPINEM

SEQ ID NO: 15517 - protein, 9 aa, Artificial Sequence
  Description of Artificial Sequence: Synthetic peptide
DIIGNIRQA

SEQ ID NO: 15518 - protein, 10 aa, Artificial Sequence
  Description of Artificial Sequence: Synthetic peptide
ETFRPAGGNM

SEQ ID NO: 15519 - protein, 10 aa, Artificial Sequence
  Description of Artificial Sequence: Synthetic peptide
ETAEGCVQIM

SEQ ID NO: 15520 - protein, 10 aa, Artificial Sequence
  Description of Artificial Sequence: Synthetic peptide
EVIPAETGQE

SEQ ID NO: 15521 - protein, 10 aa, Artificial Sequence
  Description of Artificial Sequence: Synthetic peptide
DTIAIAVANW

SEQ ID NO: 15522 - protein, 10 aa, Artificial Sequence
  Description of Artificial Sequence: Synthetic peptide
EVQKQGLGQW

SEQ ID NO: 15523 - protein, 9 aa, Artificial Sequence
  Description of Artificial Sequence: Synthetic peptide
DIIGDIRQA

SEQ ID NO: 15524 - protein, 10 aa, Artificial Sequence
  Description of Artificial Sequence: Synthetic peptide
NTADHLIHLY

SEQ ID NO: 15525 - protein, 10 aa, Artificial Sequence
  Description of Artificial Sequence: Synthetic peptide
ETFRPGGGDM

SEQ ID NO: 15526 - protein, 10 aa, Artificial Sequence
  Description of Artificial Sequence: Synthetic peptide
EIFRPGGGDM

SEQ ID NO: 15527 - protein, 9 aa, Artificial Sequence
  Description of Artificial Sequence: Synthetic peptide
EVIPAETGQ

SEQ ID NO: 15528 - protein, 9 aa, Artificial Sequence
  Description of Artificial Sequence: Synthetic peptide
DSSNSTGNY

SEQ ID NO: 15529 - protein, 9 aa, Artificial Sequence
  Description of Artificial Sequence: Synthetic peptide
ETVEITCVR

SEQ ID NO: 15530 - protein, 9 aa, Artificial Sequence
  Description of Artificial Sequence: Synthetic peptide
ETVPITCAR

SEQ ID NO: 15531 - protein, 10 aa, Artificial Sequence
  Description of Artificial Sequence: Synthetic peptide
ETINDEAAEW

SEQ ID NO: 15532 - protein, 9 aa, Artificial Sequence
  Description of Artificial Sequence: Synthetic peptide
EPIPGVETY

SEQ ID NO: 15533 - protein, 9 aa, Artificial Sequence
  Description of Artificial Sequence: Synthetic peptide
EVVQRVGRA

SEQ ID NO: 15534 - protein, 9 aa, Artificial Sequence
  Description of Artificial Sequence: Synthetic peptide
EVIPMFSAL

SEQ ID NO: 15535 - protein, 9 aa, Artificial Sequence
  Description of Artificial Sequence: Synthetic peptide
EVIPMFTAL

SEQ ID NO: 15536 - protein, 9 aa, Artificial Sequence
  Description of Artificial Sequence: Synthetic peptide
DVQAKLQEY

SEQ ID NO: 15537 - protein, 10 aa, Artificial Sequence
  Description of Artificial Sequence: Synthetic peptide
EVQKQGLGQW

SEQ ID NO: 15538 - protein, 9 aa, Artificial Sequence
  Description of Artificial Sequence: Synthetic peptide
DIAGTTSNL

SEQ ID NO: 15539 - protein, 10 aa, Artificial Sequence
  Description of Artificial Sequence: Synthetic peptide
EVNIVTDSQY

SEQ ID NO: 15540 - protein, 9 aa, Artificial Sequence
  Description of Artificial Sequence: Synthetic peptide
EVIGDIRKA

SEQ ID NO: 15541 - protein, 8 aa, Artificial Sequence
  Description of Artificial Sequence: Synthetic peptide
DVVPINEM

SEQ ID NO: 15542 - protein, 9 aa, Artificial Sequence
  Description of Artificial Sequence: Synthetic peptide
DIAGTTSTL

SEQ ID NO: 15543 - protein, 9 aa, Artificial Sequence
  Description of Artificial Sequence: Synthetic peptide
DIAGATSTL

SEQ ID NO: 15544 - protein, 9 aa, Artificial Sequence
  Description of Artificial Sequence: Synthetic peptide
STVGSTAGY

SEQ ID NO: 15545 - protein, 10 aa, Artificial Sequence
  Description of Artificial Sequence: Synthetic peptide
EIFRPGGGDM

SEQ ID NO: 15546 - protein, 10 aa, Artificial Sequence
  Description of Artificial Sequence: Synthetic peptide
ETAEGCVQIM

SEQ ID NO: 15547 - protein, 9 aa, Artificial Sequence
  Description of Artificial Sequence: Synthetic peptide
DAKLVVSTY

SEQ ID NO: 15548 - protein, 10 aa, Artificial Sequence
  Description of Artificial Sequence: Synthetic peptide
ETFRPAGGNM

SEQ ID NO: 15549 - protein, 9 aa, Artificial Sequence
  Description of Artificial Sequence: Synthetic peptide
EPIPGVETY

SEQ ID NO: 15550 - protein, 9 aa, Artificial Sequence
  Description of Artificial Sequence: Synthetic peptide
ETITLPCKI

SEQ ID NO: 15551 - protein, 9 aa, Artificial Sequence
  Description of Artificial Sequence: Synthetic peptide
EVIGDIRKA

SEQ ID NO: 15552 - protein, 9 aa, Artificial Sequence
  Description of Artificial Sequence: Synthetic peptide
ETVPITCAR

SEQ ID NO: 15553 - protein, 9 aa, Artificial Sequence
  Description of Artificial Sequence: Synthetic peptide
EVIPMFTAL

SEQ ID NO: 15554 - protein, 9 aa, Artificial Sequence
  Description of Artificial Sequence: Synthetic peptide
EVIPMFSAL

SEQ ID NO: 15555 - protein, 9 aa, Artificial Sequence
  Description of Artificial Sequence: Synthetic peptide
STVGSTAGY

SEQ ID NO: 15556 - protein, 9 aa, Artificial Sequence
  Description of Artificial Sequence: Synthetic peptide
DIIGNIRQA

SEQ ID NO: 15557 - protein, 9 aa, Artificial Sequence
  Description of Artificial Sequence: Synthetic peptide
DIIGDIRQA

SEQ ID NO: 15558 - protein, 9 aa, Artificial Sequence
  Description of Artificial Sequence: Synthetic peptide
ETVEITCVR

SEQ ID NO: 15559 - protein, 9 aa, Artificial Sequence
  Description of Artificial Sequence: Synthetic peptide
DIAGTTSNL

SEQ ID NO: 15560 - protein, 10 aa, Artificial Sequence
  Description of Artificial Sequence: Synthetic peptide
DTIAIAVANW

SEQ ID NO: 15561 - protein, 9 aa, Artificial Sequence
  Description of Artificial Sequence: Synthetic peptide
DIAGATSTL

SEQ ID NO: 15562 - protein, 9 aa, Artificial Sequence
  Description of Artificial Sequence: Synthetic peptide
MVHQAISPR

SEQ ID NO: 15563 - protein, 9 aa, Artificial Sequence
  Description of Artificial Sequence: Synthetic peptide
DVQAKLQEY

SEQ ID NO: 15564 - protein, 9 aa, Artificial Sequence
  Description of Artificial Sequence: Synthetic peptide
DIAGTTSTL

SEQ ID NO: 15565 - protein, 11 aa, Artificial Sequence
  Description of Artificial Sequence: Synthetic peptide
ETYYVDGAANR

SEQ ID NO: 15566 - protein, 10 aa, Artificial Sequence
  Description of Artificial Sequence: Synthetic peptide
EVQKQGLGQW

SEQ ID NO: 15567 - protein, 10 aa, Artificial Sequence
  Description of Artificial Sequence: Synthetic peptide
DVVPISNGNK

SEQ ID NO: 15568 - protein, 9 aa, Artificial Sequence
  Description of Artificial Sequence: Synthetic peptide
NITGLILTR

SEQ ID NO: 15569 - protein, 9 aa, Artificial Sequence
  Description of Artificial Sequence: Synthetic peptide
EIHPLASLK

SEQ ID NO: 15570 - protein, 9 aa, Artificial Sequence
  Description of Artificial Sequence: Synthetic peptide
LFNTVATLY

SEQ ID NO: 15571 - protein, 9 aa, Artificial Sequence
  Description of Artificial Sequence: Synthetic peptide
TVLDVGDAY

SEQ ID NO: 15572 - protein, 9 aa, Artificial Sequence
  Description of Artificial Sequence: Synthetic peptide
STVGSTAGY

SEQ ID NO: 15573 - protein, 9 aa, Artificial Sequence
  Description of Artificial Sequence: Synthetic peptide
NSNPVSQNY

SEQ ID NO: 15574 - protein, 10 aa, Artificial Sequence
  Description of Artificial Sequence: Synthetic peptide
GNSSQVSQNY

SEQ ID NO: 15575 - protein, 9 aa, Artificial Sequence
  Description of Artificial Sequence: Synthetic peptide
SFDPIPIHY

SEQ ID NO: 15576 - protein, 9 aa, Artificial Sequence
  Description of Artificial Sequence: Synthetic peptide
STRNITEEY

SEQ ID NO: 15577 - protein, 10 aa, Artificial Sequence
  Description of Artificial Sequence: Synthetic peptide
VTFEPIPIHY

SEQ ID NO: 15578 - protein, 9 aa, Artificial Sequence
  Description of Artificial Sequence: Synthetic peptide
NSSQVSQNY

SEQ ID NO: 15579 - protein, 10 aa, Artificial Sequence
  Description of Artificial Sequence: Synthetic peptide
GNSNPVSQNY

SEQ ID NO: 15580 - protein, 10 aa, Artificial Sequence
  Description of Artificial Sequence: Synthetic peptide
NSSSQVSQNY

SEQ ID NO: 15581 - protein, 9 aa, Artificial Sequence
  Description of Artificial Sequence: Synthetic peptide
NFDPIPIHY

SEQ ID NO: 15582 - protein, 9 aa, Artificial Sequence
  Description of Artificial Sequence: Synthetic peptide
SSSQVSQNY

SEQ ID NO: 15583 - protein, 9 aa, Artificial Sequence
  Description of Artificial Sequence: Synthetic peptide
HLGPGQALY

SEQ ID NO: 15584 - protein, 9 aa, Artificial Sequence
  Description of Artificial Sequence: Synthetic peptide
TFEPIPIHY

SEQ ID NO: 15585 - protein, 10 aa, Artificial Sequence
  Description of Artificial Sequence: Synthetic peptide
VSFDPIPIHY

SEQ ID NO: 15586 - protein, 10 aa, Artificial Sequence
  Description of Artificial Sequence: Synthetic peptide
FLNKGLGISY

SEQ ID NO: 15587 - protein, 10 aa, Artificial Sequence
  Description of Artificial Sequence: Synthetic peptide
VNFDPIPIHY

SEQ ID NO: 15588 - protein, 9 aa, Artificial Sequence
  Description of Artificial Sequence: Synthetic peptide
VWSIVFIEY

SEQ ID NO: 15589 - protein, 9 aa, Artificial Sequence
  Description of Artificial Sequence: Synthetic peptide
LFNTVATLY

SEQ ID NO: 15590 - protein, 9 aa, Artificial Sequence
  Description of Artificial Sequence: Synthetic peptide
GFFPDWQNY

SEQ ID NO: 15591 - protein, 9 aa, Artificial Sequence
  Description of Artificial Sequence: Synthetic peptide
VWSIVFIEY

SEQ ID NO: 15592 - protein, 9 aa, Artificial Sequence
  Description of Artificial Sequence: Synthetic peptide
STVGSTAGY

SEQ ID NO: 15593 - protein, 10 aa, Artificial Sequence
  Description of Artificial Sequence: Synthetic peptide
GNSSQVSQNY

SEQ ID NO: 15594 - protein, 9 aa, Artificial Sequence
  Description of Artificial Sequence: Synthetic peptide
SFDPIPIHY

SEQ ID NO: 15595 - protein, 10 aa, Artificial Sequence
  Description of Artificial Sequence: Synthetic peptide
VTFEPIPIHY

SEQ ID NO: 15596 - protein, 9 aa, Artificial Sequence
  Description of Artificial Sequence: Synthetic peptide
HLGPGQALY

SEQ ID NO: 15597 - protein, 9 aa, Artificial Sequence
  Description of Artificial Sequence: Synthetic peptide
NFDPIPIHY

SEQ ID NO: 15598 - protein, 10 aa, Artificial Sequence
  Description of Artificial Sequence: Synthetic peptide
GNSNPVSQNY

SEQ ID NO: 15599 - protein, 9 aa, Artificial Sequence
  Description of Artificial Sequence: Synthetic peptide
NSNPVSQNY

SEQ ID NO: 15600 - protein, 9 aa, Artificial Sequence
  Description of Artificial Sequence: Synthetic peptide
TFEPIPIHY

SEQ ID NO: 15601 - protein, 9 aa, Artificial Sequence
  Description of Artificial Sequence: Synthetic peptide
VWTIVFIEY

SEQ ID NO: 15602 - protein, 10 aa, Artificial Sequence
  Description of Artificial Sequence: Synthetic peptide
VSFDPIPIHY

SEQ ID NO: 15603 - protein, 9 aa, Artificial Sequence
  Description of Artificial Sequence: Synthetic peptide
YFINKSIEF

SEQ ID NO: 15604 - protein, 9 aa, Artificial Sequence
  Description of Artificial Sequence: Synthetic peptide
NNLWVTVYY

SEQ ID NO: 15605 - protein, 9 aa, Artificial Sequence
  Description of Artificial Sequence: Synthetic peptide
NSSQVSQNY

SEQ ID NO: 15606 - protein, 10 aa, Artificial Sequence
  Description of Artificial Sequence: Synthetic peptide
VNFDPIPIHY

SEQ ID NO: 15607 - protein, 10 aa, Artificial Sequence
  Description of Artificial Sequence: Synthetic peptide
VAIGPGQAFY

SEQ ID NO: 15608 - protein, 9 aa, Artificial Sequence
  Description of Artificial Sequence: Synthetic peptide
STRNITEEY

SEQ ID NO: 15609 - protein, 9 aa, Artificial Sequence
  Description of Artificial Sequence: Synthetic peptide
LNKGLGISY

SEQ ID NO: 15610 - protein, 9 aa, Artificial Sequence
  Description of Artificial Sequence: Synthetic peptide
TVLDVGDAY

SEQ ID NO: 15611 - protein, 9 aa, Artificial Sequence
  Description of Artificial Sequence: Synthetic peptide
SSSQVSQNY

SEQ ID NO: 15612 - protein, 9 aa, Artificial Sequence
  Description of Artificial Sequence: Synthetic peptide
RFGPGQAFY

SEQ ID NO: 15613 - protein, 9 aa, Artificial Sequence
  Description of Artificial Sequence: Synthetic peptide
KTRPPLPSV

SEQ ID NO: 15614 - protein, 9 aa, Artificial Sequence
  Description of Artificial Sequence: Synthetic peptide
SENNDTITL

SEQ ID NO: 15615 - protein, 9 aa, Artificial Sequence
  Description of Artificial Sequence: Synthetic peptide
KAKPPLPSV

SEQ ID NO: 15616 - protein, 9 aa, Artificial Sequence
  Description of Artificial Sequence: Synthetic peptide
SESAIRNAI

SEQ ID NO: 15617 - protein, 9 aa, Artificial Sequence
  Description of Artificial Sequence: Synthetic peptide
KELYPLTSL

SEQ ID NO: 15618 - protein, 9 aa, Artificial Sequence
  Description of Artificial Sequence: Synthetic peptide
NSNPVSQNY

SEQ ID NO: 15619 - protein, 9 aa, Artificial Sequence
  Description of Artificial Sequence: Synthetic peptide
STVGSTAGY

SEQ ID NO: 15620 - protein, 9 aa, Artificial Sequence
  Description of Artificial Sequence: Synthetic peptide
STRNITEEY

SEQ ID NO: 15621 - protein, 9 aa, Artificial Sequence
  Description of Artificial Sequence: Synthetic peptide
SSSQVSQNY

SEQ ID NO: 15622 - protein, 9 aa, Artificial Sequence
  Description of Artificial Sequence: Synthetic peptide
ISNGNKTSY

SEQ ID NO: 15623 - protein, 11 aa, Artificial Sequence
  Description of Artificial Sequence: Synthetic peptide
STSTVGSTAGY

SEQ ID NO: 15624 - protein, 10 aa, Artificial Sequence
  Description of Artificial Sequence: Synthetic peptide
VAIGPGQAFY

SEQ ID NO: 15625 - protein, 9 aa, Artificial Sequence
  Description of Artificial Sequence: Synthetic peptide
KQGPGQWTY

SEQ ID NO: 15626 - protein, 10 aa, Artificial Sequence
  Description of Artificial Sequence: Synthetic peptide
RVIEVAQRAY

SEQ ID NO: 15627 - protein, 9 aa, Artificial Sequence
  Description of Artificial Sequence: Synthetic peptide
NSSQVSQNY

SEQ ID NO: 15628 - protein, 11 aa, Artificial Sequence
  Description of Artificial Sequence: Synthetic peptide
TQNPEIVIYQY

SEQ ID NO: 15629 - protein, 9 aa, Artificial Sequence
  Description of Artificial Sequence: Synthetic peptide
AIGPGQAFY

SEQ ID NO: 15630 - protein, 9 aa, Artificial Sequence
  Description of Artificial Sequence: Synthetic peptide
KQGPDQWTY

SEQ ID NO: 15631 - protein, 9 aa, Artificial Sequence
  Description of Artificial Sequence: Synthetic peptide
TVLDVGDAY

SEQ ID NO: 15632 - protein, 9 aa, Artificial Sequence
  Description of Artificial Sequence: Synthetic peptide
HLGPGQALY

SEQ ID NO: 15633 - protein, 9 aa, Artificial Sequence
  Description of Artificial Sequence: Synthetic peptide
KAQEEHERY

SEQ ID NO: 15634 - protein, 10 aa, Artificial Sequence
  Description of Artificial Sequence: Synthetic peptide
ILKEPVHGVY

SEQ ID NO: 15635 - protein, 10 aa, Artificial Sequence
  Description of Artificial Sequence: Synthetic peptide
NSSSQVSQNY

SEQ ID NO: 15636 - protein, 11 aa, Artificial Sequence
  Description of Artificial Sequence: Synthetic peptide
SSNSTGNYSNY

SEQ ID NO: 15637 - protein, 9 aa, Artificial Sequence
  Description of Artificial Sequence: Synthetic peptide
STVGSTAGY

SEQ ID NO: 15638 - protein, 9 aa, Artificial Sequence
  Description of Artificial Sequence: Synthetic peptide
STRNITEEY

SEQ ID NO: 15639 - protein, 9 aa, Artificial Sequence
  Description of Artificial Sequence: Synthetic peptide
KQGPGQWTY

SEQ ID NO: 15640 - protein, 10 aa, Artificial Sequence
  Description of Artificial Sequence: Synthetic peptide
RVIEVAQRAY

SEQ ID NO: 15641 - protein, 9 aa, Artificial Sequence
  Description of Artificial Sequence: Synthetic peptide
KQGPDQWTY

SEQ ID NO: 15642 - protein, 9 aa, Artificial Sequence
  Description of Artificial Sequence: Synthetic peptide
NSNPVSQNY

SEQ ID NO: 15643 - protein, 9 aa, Artificial Sequence
  Description of Artificial Sequence: Synthetic peptide
SSSQVSQNY

SEQ ID NO: 15644 - protein, 9 aa, Artificial Sequence
  Description of Artificial Sequence: Synthetic peptide
ISNGNKTSY

SEQ ID NO: 15645 - protein, 9 aa, Artificial Sequence
  Description of Artificial Sequence: Synthetic peptide
AIGPGQAFY

SEQ ID NO: 15646 - protein, 10 aa, Artificial Sequence
  Description of Artificial Sequence: Synthetic peptide
FLNKGLGISY

SEQ ID NO: 15647 - protein, 10 aa, Artificial Sequence
  Description of Artificial Sequence: Synthetic peptide
VAIGPGQAFY

SEQ ID NO: 15648 - protein, 9 aa, Artificial Sequence
  Description of Artificial Sequence: Synthetic peptide
HLGPGQALY

SEQ ID NO: 15649 - protein, 11 aa, Artificial Sequence
  Description of Artificial Sequence: Synthetic peptide
STSTVGSTAGY

SEQ ID NO: 15650 - protein, 9 aa, Artificial Sequence
  Description of Artificial Sequence: Synthetic peptide
AMYSPPIAR

SEQ ID NO: 15651 - protein, 11 aa, Artificial Sequence
  Description of Artificial Sequence: Synthetic peptide
RVIEVAQRAYR

SEQ ID NO: 15652 - protein, 10 aa, Artificial Sequence
  Description of Artificial Sequence: Synthetic peptide
KTRPPLPSVR

SEQ ID NO: 15653 - protein, 11 aa, Artificial Sequence
  Description of Artificial Sequence: Synthetic peptide
KGRPGNFLQNR

SEQ ID NO: 15654 - protein, 11 aa, Artificial Sequence
  Description of Artificial Sequence: Synthetic peptide
RVIEVAQRAGR

SEQ ID NO: 15655 - protein, 9 aa, Artificial Sequence
  Description of Artificial Sequence: Synthetic peptide
KSLGVAPTR

SEQ ID NO: 15656 - protein, 11 aa, Artificial Sequence
  Description of Artificial Sequence: Synthetic peptide
KSLGVAPTRAR

SEQ ID NO: 15657 - protein, 9 aa, Artificial Sequence
  Description of Artificial Sequence: Synthetic peptide
QIYPGIKVR

SEQ ID NO: 15658 - protein, 9 aa, Artificial Sequence
  Description of Artificial Sequence: Synthetic peptide
ATLYCVHQR

SEQ ID NO: 15659 - protein, 11 aa, Artificial Sequence
  Description of Artificial Sequence: Synthetic peptide
KSNITGLILTR

SEQ ID NO: 15660 - protein, 11 aa, Artificial Sequence
  Description of Artificial Sequence: Synthetic peptide
RAIEVVQRVGR

SEQ ID NO: 15661 - protein, 11 aa, Artificial Sequence
  Description of Artificial Sequence: Synthetic peptide
RLRDLVLIAAR

SEQ ID NO: 15662 - protein, 9 aa, Artificial Sequence
  Description of Artificial Sequence: Synthetic peptide
QSRVLAIER

SEQ ID NO: 15663 - protein, 9 aa, Artificial Sequence
  Description of Artificial Sequence: Synthetic peptide
KVLVAPTRR

SEQ ID NO: 15664 - protein, 11 aa, Artificial Sequence
  Description of Artificial Sequence: Synthetic peptide
TVNDIQKLVGK

SEQ ID NO: 15665 - protein, 9 aa, Artificial Sequence
  Description of Artificial Sequence: Synthetic peptide
KGLGISYGR

SEQ ID NO: 15666 - protein, 9 aa, Artificial Sequence
  Description of Artificial Sequence: Synthetic peptide
AIRNAILGR

SEQ ID NO: 15667 - protein, 9 aa, Artificial Sequence
  Description of Artificial Sequence: Synthetic peptide
KSLGIAPTR

SEQ ID NO: 15668 - protein, 9 aa, Artificial Sequence
  Description of Artificial Sequence: Synthetic peptide
KLQEYFINK

SEQ ID NO: 15669 - protein, 9 aa, Artificial Sequence
  Description of Artificial Sequence: Synthetic peptide
ILNIPVRIR

SEQ ID NO: 15670 - protein, 10 aa, Artificial Sequence
  Description of Artificial Sequence: Synthetic peptide
KAKPPLPSVR

SEQ ID NO: 15671 - protein, 9 aa, Artificial Sequence
  Description of Artificial Sequence: Synthetic peptide
RQIHSISER

SEQ ID NO: 15672 - protein, 9 aa, Artificial Sequence
  Description of Artificial Sequence: Synthetic peptide
RSVEINCTR

SEQ ID NO: 15673 - protein, 9 aa, Artificial Sequence
  Description of Artificial Sequence: Synthetic peptide
RLIDRIRER

SEQ ID NO: 15674 - protein, 11 aa, Artificial Sequence
  Description of Artificial Sequence: Synthetic peptide
KSLGIAPTRAR

SEQ ID NO: 15675 - protein, 9 aa, Artificial Sequence
  Description of Artificial Sequence: Synthetic peptide
HSRIGITPR

SEQ ID NO: 15676 - protein, 9 aa, Artificial Sequence
  Description of Artificial Sequence: Synthetic peptide
CVRPNNNTR

SEQ ID NO: 15677 - protein, 9 aa, Artificial Sequence
  Description of Artificial Sequence: Synthetic peptide
TVWGIKQLR

SEQ ID NO: 15678 - protein, 9 aa, Artificial Sequence
  Description of Artificial Sequence: Synthetic peptide
KVIIVHLNR

SEQ ID NO: 15679 - protein, 8 aa, Artificial Sequence
  Description of Artificial Sequence: Synthetic peptide
AVLSIVNR

SEQ ID NO: 15680 - protein, 11 aa, Artificial Sequence
  Description of Artificial Sequence: Synthetic peptide
RSNITGLILTR

SEQ ID NO: 15681 - protein, 10 aa, Artificial Sequence
  Description of Artificial Sequence: Synthetic peptide
AGRAVLNIPR

SEQ ID NO: 15682 - protein, 8 aa, Artificial Sequence
  Description of Artificial Sequence: Synthetic peptide
RVIEIVQR

SEQ ID NO: 15683 - protein, 11 aa, Artificial Sequence
  Description of Artificial Sequence: Synthetic peptide
KIKPLGVTPTR

SEQ ID NO: 15684 - protein, 9 aa, Artificial Sequence
  Description of Artificial Sequence: Synthetic peptide
IVNRVRQGY

SEQ ID NO: 15685 - protein, 9 aa, Artificial Sequence
  Description of Artificial Sequence: Synthetic peptide
ISNGNKTSY

SEQ ID NO: 15686 - protein, 9 aa, Artificial Sequence
  Description of Artificial Sequence: Synthetic peptide
STRNITEEY

SEQ ID NO: 15687 - protein, 9 aa, Artificial Sequence
  Description of Artificial Sequence: Synthetic peptide
KIFNKTITF

SEQ ID NO: 15688 - protein, 9 aa, Artificial Sequence
  Description of Artificial Sequence: Synthetic peptide
NSNPVSQNY

SEQ ID NO: 15689 - protein, 9 aa, Artificial Sequence
  Description of Artificial Sequence: Synthetic peptide
DAKAYSTER

SEQ ID NO: 15690 - protein, 11 aa, Artificial Sequence
  Description of Artificial Sequence: Synthetic peptide
ETYYVDGAANR

SEQ ID NO: 15691 - protein, 10 aa, Artificial Sequence
  Description of Artificial Sequence: Synthetic peptide
DNNEIKVVPR

SEQ ID NO: 15692 - protein, 11 aa, Artificial Sequence
  Description of Artificial Sequence: Synthetic peptide
EAREFSSEQAR

SEQ ID NO: 15693 - protein, 11 aa, Artificial Sequence
  Description of Artificial Sequence: Synthetic peptide
EAREFSPEQAR

SEQ ID NO: 15694 - protein, 11 aa, Artificial Sequence
  Description of Artificial Sequence: Synthetic peptide
DGRNSSANNYR

SEQ ID NO: 15695 - protein, 9 aa, Artificial Sequence
  Description of Artificial Sequence: Synthetic peptide
DRHGAITSR

SEQ ID NO: 15696 - protein, 11 aa, Artificial Sequence
  Description of Artificial Sequence: Synthetic peptide
DVKQLTEVVQK

SEQ ID NO: 15697 - protein, 10 aa, Artificial Sequence
  Description of Artificial Sequence: Synthetic peptide
DNNSTSEIFR

SEQ ID NO: 15698 - protein, 11 aa, Artificial Sequence
  Description of Artificial Sequence: Synthetic peptide
ENLAFQQGEAR

SEQ ID NO: 15699 - protein, 9 aa, Artificial Sequence
  Description of Artificial Sequence: Synthetic peptide
ETVEITCVR

SEQ ID NO: 15700 - protein, 9 aa, Artificial Sequence
  Description of Artificial Sequence: Synthetic peptide
DAWEKIRLR

SEQ ID NO: 15701 - protein, 9 aa, Artificial Sequence
  Description of Artificial Sequence: Synthetic peptide
QARVLAVER

SEQ ID NO: 15702 - protein, 9 aa, Artificial Sequence
  Description of Artificial Sequence: Synthetic peptide
AMYSPPIAR

SEQ ID NO: 15703 - protein, 11 aa, Artificial Sequence
  Description of Artificial Sequence: Synthetic peptide
EAREFPSEQAR

SEQ ID NO: 15704 - protein, 9 aa, Artificial Sequence
  Description of Artificial Sequence: Synthetic peptide
NITGLILTR

SEQ ID NO: 15705 - protein, 9 aa, Artificial Sequence
  Description of Artificial Sequence: Synthetic peptide
NNEIKVVPR

SEQ ID NO: 15706 - protein, 9 aa, Artificial Sequence
  Description of Artificial Sequence: Synthetic peptide
DVQAKLQEY

SEQ ID NO: 15707 - protein, 9 aa, Artificial Sequence
  Description of Artificial Sequence: Synthetic peptide
MVHQAISPR

SEQ ID NO: 15708 - protein, 11 aa, Artificial Sequence
  Description of Artificial Sequence: Synthetic peptide
ETYYVDGAANR

SEQ ID NO: 15709 - protein, 9 aa, Artificial Sequence
  Description of Artificial Sequence: Synthetic peptide
ETVPITCAR

SEQ ID NO: 15710 - protein, 9 aa, Artificial Sequence
  Description of Artificial Sequence: Synthetic peptide
DAKAYSTER

SEQ ID NO: 15711 - protein, 9 aa, Artificial Sequence
  Description of Artificial Sequence: Synthetic peptide
ETVEITCVR

SEQ ID NO: 15712 - protein, 11 aa, Artificial Sequence
  Description of Artificial Sequence: Synthetic peptide
EAREFSSEQAR

SEQ ID NO: 15713 - protein, 11 aa, Artificial Sequence
  Description of Artificial Sequence: Synthetic peptide
EAREFSPEQAR

SEQ ID NO: 15714 - protein, 9 aa, Artificial Sequence
  Description of Artificial Sequence: Synthetic peptide
YYVDGAANR

SEQ ID NO: 15715 - protein, 9 aa, Artificial Sequence
  Description of Artificial Sequence: Synthetic peptide
MVHQAISPR

SEQ ID NO: 15716 - protein, 9 aa, Artificial Sequence
  Description of Artificial Sequence: Synthetic peptide
AMYSPPIAR

SEQ ID NO: 15717 - protein, 9 aa, Artificial Sequence
  Description of Artificial Sequence: Synthetic peptide
QARVLAVER

SEQ ID NO: 15718 - protein, 10 aa, Artificial Sequence
  Description of Artificial Sequence: Synthetic peptide
TYYVDGAANR

SEQ ID NO: 15719 - protein, 11 aa, Artificial Sequence
  Description of Artificial Sequence: Synthetic peptide
TVNDIQKLVGK

SEQ ID NO: 15720 - protein, 10 aa, Artificial Sequence
  Description of Artificial Sequence: Synthetic peptide
DNNEIKVVPR

SEQ ID NO: 15721 - protein, 8 aa, Artificial Sequence
  Description of Artificial Sequence: Synthetic peptide
MYSPPIAR

SEQ ID NO: 15722 - protein, 11 aa, Artificial Sequence
  Description of Artificial Sequence: Synthetic peptide
EAREFPSEQAR

SEQ ID NO: 15723 - protein, 10 aa, Artificial Sequence
  Description of Artificial Sequence: Synthetic peptide
QAMYSPPIAR

SEQ ID NO: 15724 - protein, 9 aa, Artificial Sequence
  Description of Artificial Sequence: Synthetic peptide
QSRVLAIER

SEQ ID NO: 15725 - protein, 9 aa, Artificial Sequence
  Description of Artificial Sequence: Synthetic peptide
HSRIGITPR

SEQ ID NO: 15726 - protein, 9 aa, Artificial Sequence
  Description of Artificial Sequence: Synthetic peptide
MIHQAISPR

SEQ ID NO: 15727 - protein, 9 aa, Artificial Sequence
  Description of Artificial Sequence: Synthetic peptide
QIYPGIKVR

SEQ ID NO: 15728 - protein, 9 aa, Artificial Sequence
  Description of Artificial Sequence: Synthetic peptide
DRHGAITSR

SEQ ID NO: 15729 - protein, 8 aa, Artificial Sequence
  Description of Artificial Sequence: Synthetic peptide
SFKITTER

SEQ ID NO: 15730 - protein, 9 aa, Artificial Sequence
  Description of Artificial Sequence: Synthetic peptide
NNEIKVVPR

SEQ ID NO: 15731 - protein, 10 aa, Artificial Sequence
  Description of Artificial Sequence: Synthetic peptide
ELKKIIGQVR

SEQ ID NO: 15732 - protein, 10 aa, Artificial Sequence
  Description of Artificial Sequence: Synthetic peptide
ETFRPAGGNM

SEQ ID NO: 15733 - protein, 9 aa, Artificial Sequence
  Description of Artificial Sequence: Synthetic peptide
QQKIQQAAR

SEQ ID NO: 15734 - protein, 9 aa, Artificial Sequence
  Description of Artificial Sequence: Synthetic peptide
NITGLILTR

SEQ ID NO: 15735 - protein, 11 aa, Artificial Sequence
  Description of Artificial Sequence: Synthetic peptide
ETFRPGGGDMR

SEQ ID NO: 15736 - protein, 9 aa, Artificial Sequence
  Description of Artificial Sequence: Synthetic peptide
NSIEINCIR

SEQ ID NO: 15737 - protein, 10 aa, Artificial Sequence
  Description of Artificial Sequence: Synthetic peptide
ATGDIIGNIR

SEQ ID NO: 15738 - protein, 9 aa, Artificial Sequence
  Description of Artificial Sequence: Synthetic peptide
FNLPPIVAK

SEQ ID NO: 15739 - protein, 10 aa, Artificial Sequence
  Description of Artificial Sequence: Synthetic peptide
TTGEVIGDIR

SEQ ID NO: 15740 - protein, 9 aa, Artificial Sequence
  Description of Artificial Sequence: Synthetic peptide
MTKILEPSR

SEQ ID NO: 15741 - protein, 10 aa, Artificial Sequence
  Description of Artificial Sequence: Synthetic peptide
SNITGLILTR

SEQ ID NO: 15742 - protein, 10 aa, Artificial Sequence
  Description of Artificial Sequence: Synthetic peptide
SFQTLTHHQR

SEQ ID NO: 15743 - protein, 11 aa, Artificial Sequence
  Description of Artificial Sequence: Synthetic peptide
ETYYVDGAANR

SEQ ID NO: 15744 - protein, 9 aa, Artificial Sequence
  Description of Artificial Sequence: Synthetic peptide
ETVEITCVR

SEQ ID NO: 15745 - protein, 9 aa, Artificial Sequence
  Description of Artificial Sequence: Synthetic peptide
ETVPITCAR

SEQ ID NO: 15746 - protein, 10 aa, Artificial Sequence
  Description of Artificial Sequence: Synthetic peptide
TTGEVIGDIR

SEQ ID NO: 15747 - protein, 9 aa, Artificial Sequence
  Description of Artificial Sequence: Synthetic peptide
NITGLILTR

SEQ ID NO: 15748 - protein, 11 aa, Artificial Sequence
  Description of Artificial Sequence: Synthetic peptide
QASGATIMMQK

SEQ ID NO: 15749 - protein, 10 aa, Artificial Sequence
  Description of Artificial Sequence: Synthetic peptide
ATGDIIGNIR

SEQ ID NO: 15750 - protein, 9 aa, Artificial Sequence
  Description of Artificial Sequence: Synthetic peptide
AAAAIMMQK

SEQ ID NO: 15751 - protein, 11 aa, Artificial Sequence
  Description of Artificial Sequence: Synthetic peptide
TVNDIQKLVGK

SEQ ID NO: 15752 - protein, 11 aa, Artificial Sequence
  Description of Artificial Sequence: Synthetic peptide
ETFRPGGGDMR

SEQ ID NO: 15753 - protein, 10 aa, Artificial Sequence
  Description of Artificial Sequence: Synthetic peptide
QAMYSPPIAR

SEQ ID NO: 15754 - protein, 11 aa, Artificial Sequence
  Description of Artificial Sequence: Synthetic peptide
ETFRPAGGNMK

SEQ ID NO: 15755 - protein, 11 aa, Artificial Sequence
  Description of Artificial Sequence: Synthetic peptide
TTGEVIGDIRK

SEQ ID NO: 15756 - protein, 10 aa, Artificial Sequence
  Description of Artificial Sequence: Synthetic peptide
DVVPISNGNK

SEQ ID NO: 15757 - protein, 9 aa, Artificial Sequence
  Description of Artificial Sequence: Synthetic peptide
DIVPINDGR

SEQ ID NO: 15758 - protein, 9 aa, Artificial Sequence
  Description of Artificial Sequence: Synthetic peptide
SGATIMMQK

SEQ ID NO: 15759 - protein, 10 aa, Artificial Sequence
  Description of Artificial Sequence: Synthetic peptide
EVNIVTDSQY

SEQ ID NO: 15760 - protein, 10 aa, Artificial Sequence
  Description of Artificial Sequence: Synthetic peptide
AAAAAIMMQK

SEQ ID NO: 15761 - protein, 10 aa, Artificial Sequence
  Description of Artificial Sequence: Synthetic peptide
ASITLTVQVR

SEQ ID NO: 15762 - protein, 10 aa, Artificial Sequence
  Description of Artificial Sequence: Synthetic peptide
TTSNLQEQIR

SEQ ID NO: 15763 - protein, 11 aa, Artificial Sequence
  Description of Artificial Sequence: Synthetic peptide
EIFRPGGGDMK

SEQ ID NO: 15764 - protein, 10 aa, Artificial Sequence
  Description of Artificial Sequence: Synthetic peptide
DCFSDSAIRK

SEQ ID NO: 15765 - protein, 9 aa, Artificial Sequence
  Description of Artificial Sequence: Synthetic peptide
AMYSPPIAR

SEQ ID NO: 15766 - protein, 10 aa, Artificial Sequence
  Description of Artificial Sequence: Synthetic peptide
DNNEIKVVPR

SEQ ID NO: 15767 - protein, 9 aa, Artificial Sequence
  Description of Artificial Sequence: Synthetic peptide
FAVLSIVNR

SEQ ID NO: 15768 - protein, 10 aa, Artificial Sequence
  Description of Artificial Sequence: Synthetic peptide
ATGDIIGDIR

SEQ ID NO: 15769 - protein, 11 aa, Artificial Sequence
  Description of Artificial Sequence: Synthetic peptide
DVKQLTEVVQK

SEQ ID NO: 15770 - protein, 10 aa, Artificial Sequence
  Description of Artificial Sequence: Synthetic peptide
TTSTLQEQIR

SEQ ID NO: 15771 - protein, 11 aa, Artificial Sequence
  Description of Artificial Sequence: Synthetic peptide
YATGDIIGNIR

SEQ ID NO: 15772 - protein, 9 aa, Artificial Sequence
  Description of Artificial Sequence: Synthetic peptide
NITGLLLTR

SEQ ID NO: 15773 - protein, 9 aa, Artificial Sequence
  Description of Artificial Sequence: Synthetic peptide
MVHQAISPR

SEQ ID NO: 15774 - protein, 9 aa, Artificial Sequence
  Description of Artificial Sequence: Synthetic peptide
SITLTVQVR

SEQ ID NO: 15775 - protein, 11 aa, Artificial Sequence
  Description of Artificial Sequence: Synthetic peptide
NCTEINNNSTR

SEQ ID NO: 15776 - protein, 10 aa, Artificial Sequence
  Description of Artificial Sequence: Synthetic peptide
SNITGLILTR

SEQ ID NO: 15777 - protein, 10 aa, Artificial Sequence
  Description of Artificial Sequence: Synthetic peptide
ESWTVNDIQK

SEQ ID NO: 15778 - protein, 9 aa, Artificial Sequence
  Description of Artificial Sequence: Synthetic peptide
NSIEINCIR

SEQ ID NO: 15779 - protein, 10 aa, Artificial Sequence
  Description of Artificial Sequence: Synthetic peptide
DNNSTSEIFR

SEQ ID NO: 15780 - protein, 11 aa, Artificial Sequence
  Description of Artificial Sequence: Synthetic peptide
ETAEGCQQIMR

SEQ ID NO: 15781 - protein, 9 aa, Artificial Sequence
  Description of Artificial Sequence: Synthetic peptide
DAKAYSTER

SEQ ID NO: 15782 - protein, 10 aa, Artificial Sequence
  Description of Artificial Sequence: Synthetic peptide
ASITLTAQVR

SEQ ID NO: 15783 - protein, 9 aa, Artificial Sequence
  Description of Artificial Sequence: Synthetic peptide
SRIGIIPQR

SEQ ID NO: 15784 - protein, 10 aa, Artificial Sequence
  Description of Artificial Sequence: Synthetic peptide
GAAAAIMMQK

SEQ ID NO: 15785 - protein, 11 aa, Artificial Sequence
  Description of Artificial Sequence: Synthetic peptide
EALEEVEKIQK

SEQ ID NO: 15786 - protein, 9 aa, Artificial Sequence
  Description of Artificial Sequence: Synthetic peptide
ETAYFILKL

SEQ ID NO: 15787 - protein, 9 aa, Artificial Sequence
  Description of Artificial Sequence: Synthetic peptide
TISSIFPQI

SEQ ID NO: 15788 - protein, 9 aa, Artificial Sequence
  Description of Artificial Sequence: Synthetic peptide
ETITLPCKI

SEQ ID NO: 15789 - protein, 9 aa, Artificial Sequence
  Description of Artificial Sequence: Synthetic peptide
ETAEGCVQI

SEQ ID NO: 15790 - protein, 9 aa, Artificial Sequence
  Description of Artificial Sequence: Synthetic peptide
EISAIVGLI

SEQ ID NO: 15791 - protein, 9 aa, Artificial Sequence
  Description of Artificial Sequence: Synthetic peptide
EIKSLFNTV

SEQ ID NO: 15792 - protein, 9 aa, Artificial Sequence
  Description of Artificial Sequence: Synthetic peptide
SAINLIDTV

SEQ ID NO: 15793 - protein, 9 aa, Artificial Sequence
  Description of Artificial Sequence: Synthetic peptide
QLTEVVQKI

SEQ ID NO: 15794 - protein, 9 aa, Artificial Sequence
  Description of Artificial Sequence: Synthetic peptide
EVIGDIRKA

SEQ ID NO: 15795 - protein, 9 aa, Artificial Sequence
  Description of Artificial Sequence: Synthetic peptide
EVIPMFTAL

SEQ ID NO: 15796 - protein, 9 aa, Artificial Sequence
  Description of Artificial Sequence: Synthetic peptide
TVNDIQKLV

SEQ ID NO: 15797 - protein, 9 aa, Artificial Sequence
  Description of Artificial Sequence: Synthetic peptide
ATGDIIGNI

SEQ ID NO: 15798 - protein, 9 aa, Artificial Sequence
  Description of Artificial Sequence: Synthetic peptide
TTSNLQEQI

SEQ ID NO: 15799 - protein, 9 aa, Artificial Sequence
  Description of Artificial Sequence: Synthetic peptide
TCTNVTINV

SEQ ID NO: 15800 - protein, 9 aa, Artificial Sequence
  Description of Artificial Sequence: Synthetic peptide
EISNYTQQI

SEQ ID NO: 15801 - protein, 9 aa, Artificial Sequence
  Description of Artificial Sequence: Synthetic peptide
ETVPITCAR

SEQ ID NO: 15802 - protein, 10 aa, Artificial Sequence
  Description of Artificial Sequence: Synthetic peptide
EIVNQIIEQL

SEQ ID NO: 15803 - protein, 9 aa, Artificial Sequence
  Description of Artificial Sequence: Synthetic peptide
IVNQIIEQL

SEQ ID NO: 15804 - protein, 9 aa, Artificial Sequence
  Description of Artificial Sequence: Synthetic peptide
RAIEVVQRV

SEQ ID NO: 15805 - protein, 9 aa, Artificial Sequence
  Description of Artificial Sequence: Synthetic peptide
YTAFTIPSI

SEQ ID NO: 15806 - protein, 9 aa, Artificial Sequence
  Description of Artificial Sequence: Synthetic peptide
NTVATLYCV

SEQ ID NO: 15807 - protein, 9 aa, Artificial Sequence
  Description of Artificial Sequence: Synthetic peptide
ETTNQKAEL

SEQ ID NO: 15808 - protein, 10 aa, Artificial Sequence
  Description of Artificial Sequence: Synthetic peptide
NVTTVANESV

SEQ ID NO: 15809 - protein, 9 aa, Artificial Sequence
  Description of Artificial Sequence: Synthetic peptide
DTITLPCRI

SEQ ID NO: 15810 - protein, 9 aa, Artificial Sequence
  Description of Artificial Sequence: Synthetic peptide
ETVEITCVR

SEQ ID NO: 15811 - protein, 9 aa, Artificial Sequence
  Description of Artificial Sequence: Synthetic peptide
GAASITLTV

SEQ ID NO: 15812 - protein, 9 aa, Artificial Sequence
  Description of Artificial Sequence: Synthetic peptide
TTSTLQEQI

SEQ ID NO: 15813 - protein, 9 aa, Artificial Sequence
  Description of Artificial Sequence: Synthetic peptide
DIAGTTSNL

SEQ ID NO: 15814 - protein, 9 aa, Artificial Sequence
  Description of Artificial Sequence: Synthetic peptide
MTSNPPVPV

SEQ ID NO: 15815 - protein, 9 aa, Artificial Sequence
  Description of Artificial Sequence: Synthetic peptide
NTADHLIHL

SEQ ID NO: 15816 - protein, 9 aa, Artificial Sequence
  Description of Artificial Sequence: Synthetic peptide
EVIPMFSAL

SEQ ID NO: 15817 - protein, 9 aa, Artificial Sequence
  Description of Artificial Sequence: Synthetic peptide
AVLSIINRV

SEQ ID NO: 15818 - protein, 10 aa, Artificial Sequence
  Description of Artificial Sequence: Synthetic peptide
DTIAIAVANW

SEQ ID NO: 15819 - protein, 10 aa, Artificial Sequence
  Description of Artificial Sequence: Synthetic peptide
EISAIVGLIV

SEQ ID NO: 15820 - protein, 9 aa, Artificial Sequence
  Description of Artificial Sequence: Synthetic peptide
AVLSIVNRV

SEQ ID NO: 15821 - protein, 9 aa, Artificial Sequence
  Description of Artificial Sequence: Synthetic peptide
NTKVIIVQL

SEQ ID NO: 15822 - protein, 9 aa, Artificial Sequence
  Description of Artificial Sequence: Synthetic peptide
LTAQVRQLL

SEQ ID NO: 15823 - protein, 9 aa, Artificial Sequence
  Description of Artificial Sequence: Synthetic peptide
LVNQIIEQL

SEQ ID NO: 15824 - protein, 9 aa, Artificial Sequence
  Description of Artificial Sequence: Synthetic peptide
ESFGFGEEI

SEQ ID NO: 15825 - protein, 9 aa, Artificial Sequence
  Description of Artificial Sequence: Synthetic peptide
MTSNPPIPV

SEQ ID NO: 15826 - protein, 11 aa, Artificial Sequence
  Description of Artificial Sequence: Synthetic peptide
TTSTSTVGSTA

SEQ ID NO: 15827 - protein, 11 aa, Artificial Sequence
  Description of Artificial Sequence: Synthetic peptide
EVVQKIATESI

SEQ ID NO: 15828 - protein, 9 aa, Artificial Sequence
  Description of Artificial Sequence: Synthetic peptide
NAKNIIVQL

SEQ ID NO: 15829 - protein, 9 aa, Artificial Sequence
  Description of Artificial Sequence: Synthetic peptide
IPIGPGQAF

SEQ ID NO: 15830 - protein, 9 aa, Artificial Sequence
  Description of Artificial Sequence: Synthetic peptide
SPAIFQSSM

SEQ ID NO: 15831 - protein, 9 aa, Artificial Sequence
  Description of Artificial Sequence: Synthetic peptide
RPMTYKSAL

SEQ ID NO: 15832 - protein, 9 aa, Artificial Sequence
  Description of Artificial Sequence: Synthetic peptide
TPTKAKPPL

SEQ ID NO: 15833 - protein, 10 aa, Artificial Sequence
  Description of Artificial Sequence: Synthetic peptide
RPNNNTRRSV

SEQ ID NO: 15834 - protein, 9 aa, Artificial Sequence
  Description of Artificial Sequence: Synthetic peptide
TPTKTRPPL

SEQ ID NO: 15835 - protein, 9 aa, Artificial Sequence
  Description of Artificial Sequence: Synthetic peptide
QPNKSESEL

SEQ ID NO: 15836 - protein, 9 aa, Artificial Sequence
  Description of Artificial Sequence: Synthetic peptide
GPSHKARVL

SEQ ID NO: 15837 - protein, 10 aa, Artificial Sequence
  Description of Artificial Sequence: Synthetic peptide
TPGPGTRVPL

SEQ ID NO: 15838 - protein, 10 aa, Artificial Sequence
  Description of Artificial Sequence: Synthetic peptide
RPNNNTRKSI

SEQ ID NO: 15839 - protein, 8 aa, Artificial Sequence
  Description of Artificial Sequence: Synthetic peptide
KPVVSTQL

SEQ ID NO: 15840 - protein, 10 aa, Artificial Sequence
  Description of Artificial Sequence: Synthetic peptide
SPIETVPVKL

SEQ ID NO: 15841 - protein, 10 aa, Artificial Sequence
  Description of Artificial Sequence: Synthetic peptide
TPGPGTRLPL

SEQ ID NO: 15842 - protein, 10 aa, Artificial Sequence
  Description of Artificial Sequence: Synthetic peptide
RPSNNTRKSI

SEQ ID NO: 15843 - protein, 9 aa, Artificial Sequence
  Description of Artificial Sequence: Synthetic peptide
VAIGPGQAF

SEQ ID NO: 15844 - protein, 9 aa, Artificial Sequence
  Description of Artificial Sequence: Synthetic peptide
SPTSRELRI

SEQ ID NO: 15845 - protein, 10 aa, Artificial Sequence
  Description of Artificial Sequence: Synthetic peptide
SIRFGPGQAF

SEQ ID NO: 15846 - protein, 8 aa, Artificial Sequence
  Description of Artificial Sequence: Synthetic peptide
TPGPGTRL

SEQ ID NO: 15847 - protein, 9 aa, Artificial Sequence
  Description of Artificial Sequence: Synthetic peptide
QPDRSGSEL

SEQ ID NO: 15848 - protein, 8 aa, Artificial Sequence
  Description of Artificial Sequence: Synthetic peptide
DPWVGNNL

SEQ ID NO: 15849 - protein, 9 aa, Artificial Sequence
  Description of Artificial Sequence: Synthetic peptide
TPQDLNTML

SEQ ID NO: 15850 - protein, 8 aa, Artificial Sequence
  Description of Artificial Sequence: Synthetic peptide
ELLGHNSL

SEQ ID NO: 15851 - protein, 8 aa, Artificial Sequence
  Description of Artificial Sequence: Synthetic peptide
ELLGRNSL

SEQ ID NO: 15852 - protein, 9 aa, Artificial Sequence
  Description of Artificial Sequence: Synthetic peptide
QLQARVLAL

SEQ ID NO: 15853 - protein, 8 aa, Artificial Sequence
  Description of Artificial Sequence: Synthetic peptide
DSAIRKAL

SEQ ID NO: 15854 - protein, 9 aa, Artificial Sequence
  Description of Artificial Sequence: Synthetic peptide
SISERILSA

SEQ ID NO: 15855 - protein, 9 aa, Artificial Sequence
  Description of Artificial Sequence: Synthetic peptide
YPGIKVKQL

SEQ ID NO: 15856 - protein, 8 aa, Artificial Sequence
  Description of Artificial Sequence: Synthetic peptide
DPWVGNNL

SEQ ID NO: 15857 - protein, 8 aa, Artificial Sequence
  Description of Artificial Sequence: Synthetic peptide
TAQVRQLL

SEQ ID NO: 15858 - protein, 8 aa, Artificial Sequence
  Description of Artificial Sequence: Synthetic peptide
ELLGRSSL

SEQ ID NO: 15859 - protein, 8 aa, Artificial Sequence
  Description of Artificial Sequence: Synthetic peptide
IEKVKAQL

SEQ ID NO: 15860 - protein, 8 aa, Artificial Sequence
  Description of Artificial Sequence: Synthetic peptide
TTNQKTEL

SEQ ID NO: 15861 - protein, 8 aa, Artificial Sequence
  Description of Artificial Sequence: Synthetic peptide
HLKTAVQM

SEQ ID NO: 15862 - protein, 9 aa, Artificial Sequence
  Description of Artificial Sequence: Synthetic peptide
TVKIKSLGV

SEQ ID NO: 15863 - protein, 11 aa, Artificial Sequence
  Description of Artificial Sequence: Synthetic peptide
TQIDPDLADQL

SEQ ID NO: 15864 - protein, 11 aa, Artificial Sequence
  Description of Artificial Sequence: Synthetic peptide
TQVDPDLADHL

SEQ ID NO: 15865 - protein, 11 aa, Artificial Sequence
  Description of Artificial Sequence: Synthetic peptide
TQIDPNTADHL

SEQ ID NO: 15866 - protein, 10 aa, Artificial Sequence
  Description of Artificial Sequence: Synthetic peptide
GQVGDQAEHL

SEQ ID NO: 15867 - protein, 9 aa, Artificial Sequence
  Description of Artificial Sequence: Synthetic peptide
QLTEVVQKI

SEQ ID NO: 15868 - protein, 10 aa, Artificial Sequence
  Description of Artificial Sequence: Synthetic peptide
AQNEDSEVGF

SEQ ID NO: 15869 - protein, 9 aa, Artificial Sequence
  Description of Artificial Sequence: Synthetic peptide
KQEQGQWTY

SEQ ID NO: 15870 - protein, 9 aa, Artificial Sequence
  Description of Artificial Sequence: Synthetic peptide
SLAEEDIRI

SEQ ID NO: 15871 - protein, 10 aa, Artificial Sequence
  Description of Artificial Sequence: Synthetic peptide
AQEEDSEVGF

SEQ ID NO: 15872 - protein, 10 aa, Artificial Sequence
  Description of Artificial Sequence: Synthetic peptide
GQVRDQAEHL

SEQ ID NO: 15873 - protein, 10 aa, Artificial Sequence
  Description of Artificial Sequence: Synthetic peptide
AQEEDSDVGF

SEQ ID NO: 15874 - protein, 11 aa, Artificial Sequence
  Description of Artificial Sequence: Synthetic peptide
GQIRDPTGSDI

SEQ ID NO: 15875 - protein, 9 aa, Artificial Sequence
  Description of Artificial Sequence: Synthetic peptide
SQIYPGIKI

SEQ ID NO: 15876 - protein, 9 aa, Artificial Sequence
  Description of Artificial Sequence: Synthetic peptide
QLTEVVQKI

SEQ ID NO: 15877 - protein, 9 aa, Artificial Sequence
  Description of Artificial Sequence: Synthetic peptide
GAASITLTV

SEQ ID NO: 15878 - protein, 8 aa, Artificial Sequence
  Description of Artificial Sequence: Synthetic peptide
GQMIHQAI

SEQ ID NO: 15879 - protein, 8 aa, Artificial Sequence
  Description of Artificial Sequence: Synthetic peptide
GQMVHQAI

SEQ ID NO: 15880 - protein, 9 aa, Artificial Sequence
  Description of Artificial Sequence: Synthetic peptide
SQIYPGIKI

SEQ ID NO: 15881 - protein, 9 aa, Artificial Sequence
  Description of Artificial Sequence: Synthetic peptide
SQIYPGIKV

SEQ ID NO: 15882 - protein, 9 aa, Artificial Sequence
  Description of Artificial Sequence: Synthetic peptide
QQHLLQLTV

SEQ ID NO: 15883 - protein, 9 aa, Artificial Sequence
  Description of Artificial Sequence: Synthetic peptide
GQVDCSPGI

SEQ ID NO: 15884 - protein, 9 aa, Artificial Sequence
  Description of Artificial Sequence: Synthetic peptide
VQKIATESI

SEQ ID NO: 15885 - protein, 9 aa, Artificial Sequence
  Description of Artificial Sequence: Synthetic peptide
IQKNSQQEI

SEQ ID NO: 15886 - protein, 9 aa, Artificial Sequence
  Description of Artificial Sequence: Synthetic peptide
AILNVPTRI

SEQ ID NO: 15887 - protein, 9 aa, Artificial Sequence
  Description of Artificial Sequence: Synthetic peptide
RAIEVVQRV

SEQ ID NO: 15888 - protein, 9 aa, Artificial Sequence
  Description of Artificial Sequence: Synthetic peptide
AVLSIVNRV

SEQ ID NO: 15889 - protein, 10 aa, Artificial Sequence
  Description of Artificial Sequence: Synthetic peptide
AQGQMVHQAI

SEQ ID NO: 15890 - protein, 9 aa, Artificial Sequence
  Description of Artificial Sequence: Synthetic peptide
VQNAQGQMI

SEQ ID NO: 15891 - protein, 9 aa, Artificial Sequence
  Description of Artificial Sequence: Synthetic peptide
GQGVIPLNL

SEQ ID NO: 15892 - protein, 11 aa, Artificial Sequence
  Description of Artificial Sequence: Synthetic peptide
SQASGAAAAAI

SEQ ID NO: 15893 - protein, 9 aa, Artificial Sequence
  Description of Artificial Sequence: Synthetic peptide
VQNAQGQMV

SEQ ID NO: 15894 - protein, 9 aa, Artificial Sequence
  Description of Artificial Sequence: Synthetic peptide
ASITLTVQV

SEQ ID NO: 15895 - protein, 9 aa, Artificial Sequence
  Description of Artificial Sequence: Synthetic peptide
GQAMYAPPI

SEQ ID NO: 15896 - protein, 9 aa, Artificial Sequence
  Description of Artificial Sequence: Synthetic peptide
GQAMYSPPI

SEQ ID NO: 15897 - protein, 9 aa, Artificial Sequence
  Description of Artificial Sequence: Synthetic peptide
AILNIPVRI

SEQ ID NO: 15898 - protein, 9 aa, Artificial Sequence
  Description of Artificial Sequence: Synthetic peptide
AVLSIINRV

SEQ ID NO: 15899 - protein, 9 aa, Artificial Sequence
  Description of Artificial Sequence: Synthetic peptide
VQKIATEGI

SEQ ID NO: 15900 - protein, 9 aa, Artificial Sequence
  Description of Artificial Sequence: Synthetic peptide
VQLNETVEI

SEQ ID NO: 15901 - protein, 10 aa, Artificial Sequence
  Description of Artificial Sequence: Synthetic peptide
AQGQMIHQAI

SEQ ID NO: 15902 - protein, 10 aa, Artificial Sequence
  Description of Artificial Sequence: Synthetic peptide
RQHPAAAEGV

SEQ ID NO: 15903 - protein, 9 aa, Artificial Sequence
  Description of Artificial Sequence: Synthetic peptide
SQQKIQQAA

SEQ ID NO: 15904 - protein, 9 aa, Artificial Sequence
  Description of Artificial Sequence: Synthetic peptide
GQAMYALPI

SEQ ID NO: 15905 - protein, 9 aa, Artificial Sequence
  Description of Artificial Sequence: Synthetic peptide
ASITLTAQV

SEQ ID NO: 15906 - protein, 8 aa, Artificial Sequence
  Description of Artificial Sequence: Synthetic peptide
NQIIEQLI

SEQ ID NO: 15907 - protein, 9 aa, Artificial Sequence
  Description of Artificial Sequence: Synthetic peptide
TISSIFPQI

SEQ ID NO: 15908 - protein, 9 aa, Artificial Sequence
  Description of Artificial Sequence: Synthetic peptide
SQQEIQQAA

SEQ ID NO: 15909 - protein, 9 aa, Artificial Sequence
  Description of Artificial Sequence: Synthetic peptide
SLAEGEIMI

SEQ ID NO: 15910 - protein, 10 aa, Artificial Sequence
  Description of Artificial Sequence: Synthetic peptide
KQLTEVVQKI

SEQ ID NO: 15911 - protein, 10 aa, Artificial Sequence
  Description of Artificial Sequence: Synthetic peptide
SQATGAAAAI

SEQ ID NO: 15912 - protein, 9 aa, Artificial Sequence
  Description of Artificial Sequence: Synthetic peptide
SQVSQNYPI

SEQ ID NO: 15913 - protein, 9 aa, Artificial Sequence
  Description of Artificial Sequence: Synthetic peptide
SLAEEDIRI

SEQ ID NO: 15914 - protein, 10 aa, Artificial Sequence
  Description of Artificial Sequence: Synthetic peptide
SQASGAAAAI

SEQ ID NO: 15915 - protein, 11 aa, Artificial Sequence
  Description of Artificial Sequence: Synthetic peptide
QQAGPIAPGQI

SEQ ID NO: 15916 - protein, 8 aa, Artificial Sequence
  Description of Artificial Sequence: Synthetic peptide
GQETAYFI

SEQ ID NO: 15917 - protein, 8 aa, Artificial Sequence
  Description of Artificial Sequence: Synthetic peptide
KQNKIQKI

SEQ ID NO: 15918 - protein, 9 aa, Artificial Sequence
  Description of Artificial Sequence: Synthetic peptide
NQKTELQAI

SEQ ID NO: 15919 - protein, 9 aa, Artificial Sequence
  Description of Artificial Sequence: Synthetic peptide
KQMAGGDCV

SEQ ID NO: 15920 - protein, 9 aa, Artificial Sequence
  Description of Artificial Sequence: Synthetic peptide
KLVPVDPAV

SEQ ID NO: 15921 - protein, 9 aa, Artificial Sequence
  Description of Artificial Sequence: Synthetic peptide
AQLQPALQT

SEQ ID NO: 15922 - protein, 9 aa, Artificial Sequence
  Description of Artificial Sequence: Synthetic peptide
NQKAELQAI

SEQ ID NO: 15923 - protein, 9 aa, Artificial Sequence
  Description of Artificial Sequence: Synthetic peptide
TCTNVTINV

SEQ ID NO: 15924 - protein, 9 aa, Artificial Sequence
  Description of Artificial Sequence: Synthetic peptide
ERYLRDQQL

SEQ ID NO: 15925 - protein, 8 aa, Artificial Sequence
  Description of Artificial Sequence: Synthetic peptide
ERVLSTCL

SEQ ID NO: 15926 - protein, 9 aa, Artificial Sequence
  Description of Artificial Sequence: Synthetic peptide
DRFALNPGL

SEQ ID NO: 15927 - protein, 9 aa, Artificial Sequence
  Description of Artificial Sequence: Synthetic peptide
ERYLKDQQL

SEQ ID NO: 15928 - protein, 8 aa, Artificial Sequence
  Description of Artificial Sequence: Synthetic peptide
ERILSTCL

SEQ ID NO: 15929 - protein, 8 aa, Artificial Sequence
  Description of Artificial Sequence: Synthetic peptide
ERILSSCL

SEQ ID NO: 15930 - protein, 8 aa, Artificial Sequence
  Description of Artificial Sequence: Synthetic peptide
MRQLQPAL

SEQ ID NO: 15931 - protein, 9 aa, Artificial Sequence
  Description of Artificial Sequence: Synthetic peptide
ERFALNPGL

SEQ ID NO: 15932 - protein, 9 aa, Artificial Sequence
  Description of Artificial Sequence: Synthetic peptide
ERYLRDQQL

SEQ ID NO: 15933 - protein, 9 aa, Artificial Sequence
  Description of Artificial Sequence: Synthetic peptide
ERYLKDQQL

SEQ ID NO: 15934 - protein, 8 aa, Artificial Sequence
  Description of Artificial Sequence: Synthetic peptide
GQMVHQAI

SEQ ID NO: 15935 - protein, 9 aa, Artificial Sequence
  Description of Artificial Sequence: Synthetic peptide
VELLGHNSL

SEQ ID NO: 15936 - protein, 8 aa, Artificial Sequence
  Description of Artificial Sequence: Synthetic peptide
DSAIRKAL

SEQ ID NO: 15937 - protein, 8 aa, Artificial Sequence
  Description of Artificial Sequence: Synthetic peptide
GQMIHQAI

SEQ ID NO: 15938 - protein, 8 aa, Artificial Sequence
  Description of Artificial Sequence: Synthetic peptide
ERVLSTCL

SEQ ID NO: 15939 - protein, 9 aa, Artificial Sequence
  Description of Artificial Sequence: Synthetic peptide
DRFALNPGL

SEQ ID NO: 15940 - protein, 9 aa, Artificial Sequence
  Description of Artificial Sequence: Synthetic peptide
TGVGRPQVL

SEQ ID NO: 15941 - protein, 8 aa, Artificial Sequence
  Description of Artificial Sequence: Synthetic peptide
ELLGHNSL

SEQ ID NO: 15942 - protein, 8 aa, Artificial Sequence
  Description of Artificial Sequence: Synthetic peptide
IQKLVGKL

SEQ ID NO: 15943 - protein, 9 aa, Artificial Sequence
  Description of Artificial Sequence: Synthetic peptide
VELLGRSSL

SEQ ID NO: 15944 - protein, 9 aa, Artificial Sequence
  Description of Artificial Sequence: Synthetic peptide
VAIGPGQAF

SEQ ID NO: 15945 - protein, 9 aa, Artificial Sequence
  Description of Artificial Sequence: Synthetic peptide
ISNGNKTSY

SEQ ID NO: 15946 - protein, 9 aa, Artificial Sequence
  Description of Artificial Sequence: Synthetic peptide
SQKQQQAAM

SEQ ID NO: 15947 - protein, 9 aa, Artificial Sequence
  Description of Artificial Sequence: Synthetic peptide
STVGSTAGY

SEQ ID NO: 15948 - protein, 9 aa, Artificial Sequence
  Description of Artificial Sequence: Synthetic peptide
KQGPGQWTY

SEQ ID NO: 15949 - protein, 9 aa, Artificial Sequence
  Description of Artificial Sequence: Synthetic peptide
TQNPEIVIY

SEQ ID NO: 15950 - protein, 9 aa, Artificial Sequence
  Description of Artificial Sequence: Synthetic peptide
STRNITEEY

SEQ ID NO: 15951 - protein, 8 aa, Artificial Sequence
  Description of Artificial Sequence: Synthetic peptide
VQAKLQEY

SEQ ID NO: 15952 - protein, 9 aa, Artificial Sequence
  Description of Artificial Sequence: Synthetic peptide
AIGPGQAFY

SEQ ID NO: 15953 - protein, 8 aa, Artificial Sequence
  Description of Artificial Sequence: Synthetic peptide
GQYIYNTY

SEQ ID NO: 15954 - protein, 9 aa, Artificial Sequence
  Description of Artificial Sequence: Synthetic peptide
WQKVGQAMY

SEQ ID NO: 15955 - protein, 8 aa, Artificial Sequence
  Description of Artificial Sequence: Synthetic peptide
GQHIYNTY

SEQ ID NO: 15956 - protein, 11 aa, Artificial Sequence
  Description of Artificial Sequence: Synthetic peptide
VQKQEQGQWTY

SEQ ID NO: 15957 - protein, 10 aa, Artificial Sequence
  Description of Artificial Sequence: Synthetic peptide
RVIEVAQRAY

SEQ ID NO: 15958 - protein, 9 aa, Artificial Sequence
  Description of Artificial Sequence: Synthetic peptide
KQGPDQWTY

SEQ ID NO: 15959 - protein, 9 aa, Artificial Sequence
  Description of Artificial Sequence: Synthetic peptide
HLGPGQALY

SEQ ID NO: 15960 - protein, 8 aa, Artificial Sequence
  Description of Artificial Sequence: Synthetic peptide
GQLIYNTY

SEQ ID NO: 15961 - protein, 11 aa, Artificial Sequence
  Description of Artificial Sequence: Synthetic peptide
VQKQGPGQWTY

SEQ ID NO: 15962 - protein, 9 aa, Artificial Sequence
  Description of Artificial Sequence: Synthetic peptide
AIMMQKSNF

SEQ ID NO: 15963 - protein, 10 aa, Artificial Sequence
  Description of Artificial Sequence: Synthetic peptide
SVAIGPGQAF

SEQ ID NO: 15964 - protein, 9 aa, Artificial Sequence
  Description of Artificial Sequence: Synthetic peptide
KQITKIQNF

SEQ ID NO: 15965 - protein, 9 aa, Artificial Sequence
  Description of Artificial Sequence: Synthetic peptide
VQKIATESI

SEQ ID NO: 15966 - protein, 9 aa, Artificial Sequence
  Description of Artificial Sequence: Synthetic peptide
FQQGEAREF

SEQ ID NO: 15967 - protein, 9 aa, Artificial Sequence
  Description of Artificial Sequence: Synthetic peptide
TQIGCTLNF

SEQ ID NO: 15968 - protein, 10 aa, Artificial Sequence
  Description of Artificial Sequence: Synthetic peptide
AQNEDSEVGF

SEQ ID NO: 15969 - protein, 11 aa, Artificial Sequence
  Description of Artificial Sequence: Synthetic peptide
VQKQGPDQWTY

SEQ ID NO: 15970 - protein, 10 aa, Artificial Sequence
  Description of Artificial Sequence: Synthetic peptide
IQWDREISNY

SEQ ID NO: 15971 - protein, 9 aa, Artificial Sequence
  Description of Artificial Sequence: Synthetic peptide
TVLDVGDAY

SEQ ID NO: 15972 - protein, 9 aa, Artificial Sequence
  Description of Artificial Sequence: Synthetic peptide
IPIGPGQAF

SEQ ID NO: 15973 - protein, 9 aa, Artificial Sequence
  Description of Artificial Sequence: Synthetic peptide
NSNPVSQNY

SEQ ID NO: 15974 - protein, 9 aa, Artificial Sequence
  Description of Artificial Sequence: Synthetic peptide
KQEQGQWTY

SEQ ID NO: 15975 - protein, 10 aa, Artificial Sequence
  Description of Artificial Sequence: Synthetic peptide
ILKEPVHGVY

SEQ ID NO: 15976 - protein, 9 aa, Artificial Sequence
  Description of Artificial Sequence: Synthetic peptide
SQASGATIM

SEQ ID NO: 15977 - protein, 9 aa, Artificial Sequence
  Description of Artificial Sequence: Synthetic peptide
AIVGLIVAF

SEQ ID NO: 15978 - protein, 10 aa, Artificial Sequence
  Description of Artificial Sequence: Synthetic peptide
FLNKGLGISY

SEQ ID NO: 15979 - protein, 9 aa, Artificial Sequence
  Description of Artificial Sequence: Synthetic peptide
RAVGVGAVF

SEQ ID NO: 15980 - protein, 9 aa, Artificial Sequence
  Description of Artificial Sequence: Synthetic peptide
KQIIKIQNF

SEQ ID NO: 15981 - protein, 9 aa, Artificial Sequence
  Description of Artificial Sequence: Synthetic peptide
GIVSPRCEY

SEQ ID NO: 15982 - protein, 10 aa, Artificial Sequence
  Description of Artificial Sequence: Synthetic peptide
VQWEREISNY

SEQ ID NO: 15983 - protein, 9 aa, Artificial Sequence
  Description of Artificial Sequence: Synthetic peptide
VIEVAQRAY

SEQ ID NO: 15984 - protein, 11 aa, Artificial Sequence
  Description of Artificial Sequence: Synthetic peptide
KSIPIGPGQAF

SEQ ID NO: 15985 - protein, 8 aa, Artificial Sequence
  Description of Artificial Sequence: Synthetic peptide
AVHVASGY

SEQ ID NO: 15986 - protein, 10 aa, Artificial Sequence
  Description of Artificial Sequence: Synthetic peptide
VAIGPGQAFY

SEQ ID NO: 15987 - protein, 9 aa, Artificial Sequence
  Description of Artificial Sequence: Synthetic peptide
VQKQEQGQW

SEQ ID NO: 15988 - protein, 9 aa, Artificial Sequence
  Description of Artificial Sequence: Synthetic peptide
SSSQVSQNY

SEQ ID NO: 15989 - protein, 8 aa, Artificial Sequence
  Description of Artificial Sequence: Synthetic peptide
WQKVGQAM

SEQ ID NO: 15990 - protein, 9 aa, Artificial Sequence
  Description of Artificial Sequence: Synthetic peptide
FLGAAGSTM

SEQ ID NO: 15991 - protein, 8 aa, Artificial Sequence
  Description of Artificial Sequence: Synthetic peptide
GQMVHQAI

SEQ ID NO: 15992 - protein, 9 aa, Artificial Sequence
  Description of Artificial Sequence: Synthetic peptide
HTKVGSLQY

SEQ ID NO: 15993 - protein, 9 aa, Artificial Sequence
  Description of Artificial Sequence: Synthetic peptide
AQEIKNCSF

SEQ ID NO: 15994 - protein, 9 aa, Artificial Sequence
  Description of Artificial Sequence: Synthetic peptide
FLGTAGSTM

SEQ ID NO: 15995 - protein, 9 aa, Artificial Sequence
  Description of Artificial Sequence: Synthetic peptide
SVAALQVCF

SEQ ID NO: 15996 - protein, 9 aa, Artificial Sequence
  Description of Artificial Sequence: Synthetic peptide
VQKIATEGI

SEQ ID NO: 15997 - protein, 9 aa, Artificial Sequence
  Description of Artificial Sequence: Synthetic peptide
NMRNVTENF

SEQ ID NO: 15998 - protein, 10 aa, Artificial Sequence
  Description of Artificial Sequence: Synthetic peptide
GFLGTAGSTM

SEQ ID NO: 15999 - protein, 8 aa, Artificial Sequence
  Description of Artificial Sequence: Synthetic peptide
WQRVGQAM

SEQ ID NO: 16000 - protein, 9 aa, Artificial Sequence
  Description of Artificial Sequence: Synthetic peptide
ISNYTQQIY

SEQ ID NO: 16001 - protein, 9 aa, Artificial Sequence
  Description of Artificial Sequence: Synthetic peptide
AQRAGRAVL

SEQ ID NO: 16002 - protein, 9 aa, Artificial Sequence
  Description of Artificial Sequence: Synthetic peptide
IPIGPGQAF

SEQ ID NO: 16003 - protein, 9 aa, Artificial Sequence
  Description of Artificial Sequence: Synthetic peptide
TVLDVGDAY

SEQ ID NO: 16004 - protein, 9 aa, Artificial Sequence
  Description of Artificial Sequence: Synthetic peptide
FLGAAGSTM

SEQ ID NO: 16005 - protein, 9 aa, Artificial Sequence
  Description of Artificial Sequence: Synthetic peptide
HLGPGQALY

SEQ ID NO: 16006 - protein, 9 aa, Artificial Sequence
  Description of Artificial Sequence: Synthetic peptide
FLGTAGSTM

SEQ ID NO: 16007 - protein, 8 aa, Artificial Sequence
  Description of Artificial Sequence: Synthetic peptide
DVVPINEM

SEQ ID NO: 16008 - protein, 9 aa, Artificial Sequence
  Description of Artificial Sequence: Synthetic peptide
VAIGPGQAF

SEQ ID NO: 16009 - protein, 10 aa, Artificial Sequence
  Description of Artificial Sequence: Synthetic peptide
FLNKGLGISY

SEQ ID NO: 16010 - protein, 10 aa, Artificial Sequence
  Description of Artificial Sequence: Synthetic peptide
SVAIGPGQAF

SEQ ID NO: 16011 - protein, 9 aa, Artificial Sequence
  Description of Artificial Sequence: Synthetic peptide
DAKLVVSTY

SEQ ID NO: 16012 - protein, 9 aa, Artificial Sequence
  Description of Artificial Sequence: Synthetic peptide
TQNPEIVIY

SEQ ID NO: 16013 - protein, 9 aa, Artificial Sequence
  Description of Artificial Sequence: Synthetic peptide
TVGGHQAAM

SEQ ID NO: 16014 - protein, 9 aa, Artificial Sequence
  Description of Artificial Sequence: Synthetic peptide
EPIPGVETY

SEQ ID NO: 16015 - protein, 9 aa, Artificial Sequence
  Description of Artificial Sequence: Synthetic peptide
SQKQQQAAM

SEQ ID NO: 16016 - protein, 9 aa, Artificial Sequence
  Description of Artificial Sequence: Synthetic peptide
QASGATIMM

SEQ ID NO: 16017 - protein, 9 aa, Artificial Sequence
  Description of Artificial Sequence: Synthetic peptide
EPIPGAETY

SEQ ID NO: 16018 - protein, 9 aa, Artificial Sequence
  Description of Artificial Sequence: Synthetic peptide
DATLVVRTY

SEQ ID NO: 16019 - protein, 11 aa, Artificial Sequence
  Description of Artificial Sequence: Synthetic peptide
VPISNGNKTSY

SEQ ID NO: 16020 - protein, 9 aa, Artificial Sequence
  Description of Artificial Sequence: Synthetic peptide
EPIIGAETY

SEQ ID NO: 16021 - protein, 9 aa, Artificial Sequence
  Description of Artificial Sequence: Synthetic peptide
HTKVGSLQY

SEQ ID NO: 16022 - protein, 9 aa, Artificial Sequence
  Description of Artificial Sequence: Synthetic peptide
DIAGATSTL

SEQ ID NO: 16023 - protein, 8 aa, Artificial Sequence
  Description of Artificial Sequence: Synthetic peptide
DQLIHLHY

SEQ ID NO: 16024 - protein, 9 aa, Artificial Sequence
  Description of Artificial Sequence: Synthetic peptide
SQASGATIM

SEQ ID NO: 16025 - protein, 9 aa, Artificial Sequence
  Description of Artificial Sequence: Synthetic peptide
EIVSPRCEY

SEQ ID NO: 16026 - protein, 9 aa, Artificial Sequence
  Description of Artificial Sequence: Synthetic peptide
STVGSTAGY

SEQ ID NO: 16027 - protein, 8 aa, Artificial Sequence
  Description of Artificial Sequence: Synthetic peptide
GQYIYNTY

SEQ ID NO: 16028 - protein, 9 aa, Artificial Sequence
  Description of Artificial Sequence: Synthetic peptide
NVTENFNVW

SEQ ID NO: 16029 - protein, 9 aa, Artificial Sequence
  Description of Artificial Sequence: Synthetic peptide
NMRNVTENF

SEQ ID NO: 16030 - protein, 9 aa, Artificial Sequence
  Description of Artificial Sequence: Synthetic peptide
FQQGEAREF

SEQ ID NO: 16031 - protein, 9 aa, Artificial Sequence
  Description of Artificial Sequence: Synthetic peptide
STRNITEEY

SEQ ID NO: 16032 - protein, 8 aa, Artificial Sequence
  Description of Artificial Sequence: Synthetic peptide
DHRENPTM

SEQ ID NO: 16033 - protein, 9 aa, Artificial Sequence
  Description of Artificial Sequence: Synthetic peptide
SAEPVPLQL

SEQ ID NO: 16034 - protein, 9 aa, Artificial Sequence
  Description of Artificial Sequence: Synthetic peptide
DIAGTTSTL

SEQ ID NO: 16035 - protein, 9 aa, Artificial Sequence
  Description of Artificial Sequence: Synthetic peptide
VIEVAQRAY

SEQ ID NO: 16036 - protein, 10 aa, Artificial Sequence
  Description of Artificial Sequence: Synthetic peptide
EVNIVTDSQY

SEQ ID NO: 16037 - protein, 8 aa, Artificial Sequence
  Description of Artificial Sequence: Synthetic peptide
AKLVVSTY

SEQ ID NO: 16038 - protein, 9 aa, Artificial Sequence
  Description of Artificial Sequence: Synthetic peptide
KQGPGQWTY

SEQ ID NO: 16039 - protein, 8 aa, Artificial Sequence
  Description of Artificial Sequence: Synthetic peptide
GQYIYNTY

SEQ ID NO: 16040 - protein, 9 aa, Artificial Sequence
  Description of Artificial Sequence: Synthetic peptide
VAIGPGQAF

SEQ ID NO: 16041 - protein, 8 aa, Artificial Sequence
  Description of Artificial Sequence: Synthetic peptide
AKLVVRTY

SEQ ID NO: 16042 - protein, 9 aa, Artificial Sequence
  Description of Artificial Sequence: Synthetic peptide
IKNPEIVIY

SEQ ID NO: 16043 - protein, 9 aa, Artificial Sequence
  Description of Artificial Sequence: Synthetic peptide
SKIGPENPY

SEQ ID NO: 16044 - protein, 9 aa, Artificial Sequence
  Description of Artificial Sequence: Synthetic peptide
TQNPEIVIY

SEQ ID NO: 16045 - protein, 9 aa, Artificial Sequence
  Description of Artificial Sequence: Synthetic peptide
STRNITEEY

SEQ ID NO: 16046 - protein, 9 aa, Artificial Sequence
  Description of Artificial Sequence: Synthetic peptide
GKGDTSLSF

SEQ ID NO: 16047 - protein, 9 aa, Artificial Sequence
  Description of Artificial Sequence: Synthetic peptide
GKKAIGTVL

SEQ ID NO: 16048 - protein, 8 aa, Artificial Sequence
  Description of Artificial Sequence: Synthetic peptide
VQAKLQEY

SEQ ID NO: 16049 - protein, 8 aa, Artificial Sequence
  Description of Artificial Sequence: Synthetic peptide
GQLIYNTY

SEQ ID NO: 16050 - protein, 8 aa, Artificial Sequence
  Description of Artificial Sequence: Synthetic peptide
QKVGQAMY

SEQ ID NO: 16051 - protein, 8 aa, Artificial Sequence
  Description of Artificial Sequence: Synthetic peptide
GQHIYNTY

SEQ ID NO: 16052 - protein, 9 aa, Artificial Sequence
  Description of Artificial Sequence: Synthetic peptide
TKNPEMVIY

SEQ ID NO: 16053 - protein, 8 aa, Artificial Sequence
  Description of Artificial Sequence: Synthetic peptide
TKVGSLQY

SEQ ID NO: 16054 - protein, 9 aa, Artificial Sequence
  Description of Artificial Sequence: Synthetic peptide
SQKQQQAAM

SEQ ID NO: 16055 - protein, 9 aa, Artificial Sequence
  Description of Artificial Sequence: Synthetic peptide
FQQGEAREF

SEQ ID NO: 16056 - protein, 8 aa, Artificial Sequence
  Description of Artificial Sequence: Synthetic peptide
NKGLGISY

SEQ ID NO: 16057 - protein, 9 aa, Artificial Sequence
  Description of Artificial Sequence: Synthetic peptide
WQKVGQAMY

SEQ ID NO: 16058 - protein, 9 aa, Artificial Sequence
  Description of Artificial Sequence: Synthetic peptide
KQEQGQWTY

SEQ ID NO: 16059 - protein, 9 aa, Artificial Sequence
  Description of Artificial Sequence: Synthetic peptide
KQGPDQWTY

SEQ ID NO: 16060 - protein, 9 aa, Artificial Sequence
  Description of Artificial Sequence: Synthetic peptide
IRFGPGQAF

SEQ ID NO: 16061 - protein, 10 aa, Artificial Sequence
  Description of Artificial Sequence: Synthetic peptide
QKQGPGQWTY

SEQ ID NO: 16062 - protein, 9 aa, Artificial Sequence
  Description of Artificial Sequence: Synthetic peptide
VKVVEEKAF

SEQ ID NO: 16063 - protein, 9 aa, Artificial Sequence
  Description of Artificial Sequence: Synthetic peptide
GKRAIGTVL

SEQ ID NO: 16064 - protein, 9 aa, Artificial Sequence
  Description of Artificial Sequence: Synthetic peptide
IKNPEMVIY

SEQ ID NO: 16065 - protein, 9 aa, Artificial Sequence
  Description of Artificial Sequence: Synthetic peptide
KQITKIQNF

SEQ ID NO: 16066 - protein, 9 aa, Artificial Sequence
  Description of Artificial Sequence: Synthetic peptide
QHSRIGITL

SEQ ID NO: 16067 - protein, 9 aa, Artificial Sequence
  Description of Artificial Sequence: Synthetic peptide
IHLGPGQAL

SEQ ID NO: 16068 - protein, 8 aa, Artificial Sequence
  Description of Artificial Sequence: Synthetic peptide
YHDPSKEL

SEQ ID NO: 16069 - protein, 9 aa, Artificial Sequence
  Description of Artificial Sequence: Synthetic peptide
IHSISERVL

SEQ ID NO: 16070 - protein, 9 aa, Artificial Sequence
  Description of Artificial Sequence: Synthetic peptide
HQAISPRTL

SEQ ID NO: 16071 - protein, 9 aa, Artificial Sequence
  Description of Artificial Sequence: Synthetic peptide
EHLKTAVQM

SEQ ID NO: 16072 - protein, 9 aa, Artificial Sequence
  Description of Artificial Sequence: Synthetic peptide
THLEGKIIL

SEQ ID NO: 16073 - protein, 9 aa, Artificial Sequence
  Description of Artificial Sequence: Synthetic peptide
NHTEANNTV

SEQ ID NO: 16074 - protein, 9 aa, Artificial Sequence
  Description of Artificial Sequence: Synthetic peptide
GHQAAMQML

SEQ ID NO: 16075 - protein, 9 aa, Artificial Sequence
  Description of Artificial Sequence: Synthetic peptide
YHDPSKELI

SEQ ID NO: 16076 - protein, 9 aa, Artificial Sequence
  Description of Artificial Sequence: Synthetic peptide
IHSISERIL

SEQ ID NO: 16077 - protein, 9 aa, Artificial Sequence
  Description of Artificial Sequence: Synthetic peptide
AHTNDVKQL

SEQ ID NO: 16078 - protein, 9 aa, Artificial Sequence
  Description of Artificial Sequence: Synthetic peptide
FQQGEARKL

SEQ ID NO: 16079 - protein, 9 aa, Artificial Sequence
  Description of Artificial Sequence: Synthetic peptide
IHTDNGPNF

SEQ ID NO: 16080 - protein, 8 aa, Artificial Sequence
  Description of Artificial Sequence: Synthetic peptide
DHRENPTM

SEQ ID NO: 16081 - protein, 10 aa, Artificial Sequence
  Description of Artificial Sequence: Synthetic peptide
HQNPVPKQPL

SEQ ID NO: 16082 - protein, 10 aa, Artificial Sequence
  Description of Artificial Sequence: Synthetic peptide
IHQAISPRTL

SEQ ID NO: 16083 - protein, 9 aa, Artificial Sequence
  Description of Artificial Sequence: Synthetic peptide
SQIYPGIKV

SEQ ID NO: 16084 - protein, 9 aa, Artificial Sequence
  Description of Artificial Sequence: Synthetic peptide
VAIGPGQAF

SEQ ID NO: 16085 - protein, 9 aa, Artificial Sequence
  Description of Artificial Sequence: Synthetic peptide
TVAIAVANW

SEQ ID NO: 16086 - protein, 9 aa, Artificial Sequence
  Description of Artificial Sequence: Synthetic peptide
TVLDVGDAY

SEQ ID NO: 16087 - protein, 9 aa, Artificial Sequence
  Description of Artificial Sequence: Synthetic peptide
TINDEAAEW

SEQ ID NO: 16088 - protein, 9 aa, Artificial Sequence
  Description of Artificial Sequence: Synthetic peptide
IPIGPGQAF

SEQ ID NO: 16089 - protein, 9 aa, Artificial Sequence
  Description of Artificial Sequence: Synthetic peptide
TINEEAAEW

SEQ ID NO: 16090 - protein, 9 aa, Artificial Sequence
  Description of Artificial Sequence: Synthetic peptide
VQKQEQGQW

SEQ ID NO: 16091 - protein, 9 aa, Artificial Sequence
  Description of Artificial Sequence: Synthetic peptide
TIAIAVANW

SEQ ID NO: 16092 - protein, 9 aa, Artificial Sequence
  Description of Artificial Sequence: Synthetic peptide
DELATLVEM

SEQ ID NO: 16093 - protein, 11 aa, Artificial Sequence
  Description of Artificial Sequence: Synthetic peptide
SEVNIVTDSQY

SEQ ID NO: 16094 - protein, 8 aa, Artificial Sequence
  Description of Artificial Sequence: Synthetic peptide
LEITTHSF

SEQ ID NO: 16095 - protein, 8 aa, Artificial Sequence
  Description of Artificial Sequence: Synthetic peptide
NETPGIRY

SEQ ID NO: 16096 - protein, 8 aa, Artificial Sequence
  Description of Artificial Sequence: Synthetic peptide
IENVTENF

SEQ ID NO: 16097 - protein, 8 aa, Artificial Sequence
  Description of Artificial Sequence: Synthetic peptide
TELQAIQL

SEQ ID NO: 16098 - protein, 8 aa, Artificial Sequence
  Description of Artificial Sequence: Synthetic peptide
PEIVIYQY

SEQ ID NO: 16099 - protein, 8 aa, Artificial Sequence
  Description of Artificial Sequence: Synthetic peptide
EEIKNCSF

SEQ ID NO: 16100 - protein, 8 aa, Artificial Sequence
  Description of Artificial Sequence: Synthetic peptide
IEIVQRAF

SEQ ID NO: 16101 - protein, 8 aa, Artificial Sequence
  Description of Artificial Sequence: Synthetic peptide
DEELLRAV

SEQ ID NO: 16102 - protein, 8 aa, Artificial Sequence
  Description of Artificial Sequence: Synthetic peptide
TEELATLM

SEQ ID NO: 16103 - protein, 8 aa, Artificial Sequence
  Description of Artificial Sequence: Synthetic peptide
IEVAQRAY

SEQ ID NO: 16104 - protein, 10 aa, Artificial Sequence
  Description of Artificial Sequence: Synthetic peptide
TEPIIGAETY

SEQ ID NO: 16105 - protein, 8 aa, Artificial Sequence
  Description of Artificial Sequence: Synthetic peptide
PEMVIYQY

SEQ ID NO: 16106 - protein, 8 aa, Artificial Sequence
  Description of Artificial Sequence: Synthetic peptide
NETEIFRP

SEQ ID NO: 16107 - protein, 8 aa, Artificial Sequence
  Description of Artificial Sequence: Synthetic peptide
DEELLTAV

SEQ ID NO: 16108 - protein, 9 aa, Artificial Sequence
  Description of Artificial Sequence: Synthetic peptide
ARVLAVERY

SEQ ID NO: 16109 - protein, 10 aa, Artificial Sequence
  Description of Artificial Sequence: Synthetic peptide
GNSSQVSQNY

SEQ ID NO: 16110 - protein, 10 aa, Artificial Sequence
  Description of Artificial Sequence: Synthetic peptide
VRQGYSPLSF

SEQ ID NO: 16111 - protein, 10 aa, Artificial Sequence
  Description of Artificial Sequence: Synthetic peptide
GGLDGLVYSK

SEQ ID NO: 16112 - protein, 9 aa, Artificial Sequence
  Description of Artificial Sequence: Synthetic peptide
GRNSSANNY

SEQ ID NO: 16113 - protein, 11 aa, Artificial Sequence
  Description of Artificial Sequence: Synthetic peptide
GQVGDQAEHLK

SEQ ID NO: 16114 - protein, 9 aa, Artificial Sequence
  Description of Artificial Sequence: Synthetic peptide
SRVLAIERY

SEQ ID NO: 16115 - protein, 10 aa, Artificial Sequence
  Description of Artificial Sequence: Synthetic peptide
GGLDGLIYSK

SEQ ID NO: 16116 - protein, 10 aa, Artificial Sequence
  Description of Artificial Sequence: Synthetic peptide
IRFGPGQAFY

SEQ ID NO: 16117 - protein, 11 aa, Artificial Sequence
  Description of Artificial Sequence: Synthetic peptide
KGGLEGLIYSK

SEQ ID NO: 16118 - protein, 8 aa, Artificial Sequence
  Description of Artificial Sequence: Synthetic peptide
LDGLVYSK

SEQ ID NO: 16119 - protein, 9 aa, Artificial Sequence
  Description of Artificial Sequence: Synthetic peptide
SLFGNDQSK

SEQ ID NO: 16120 - protein, 9 aa, Artificial Sequence
  Description of Artificial Sequence: Synthetic peptide
ILGEIVSPR

SEQ ID NO: 16121 - protein, 9 aa, Artificial Sequence
  Description of Artificial Sequence: Synthetic peptide
GLDGLVYSK

SEQ ID NO: 16122 - protein, 9 aa, Artificial Sequence
  Description of Artificial Sequence: Synthetic peptide
TDAIIGDIR

SEQ ID NO: 16123 - protein, 9 aa, Artificial Sequence
  Description of Artificial Sequence: Synthetic peptide
IRFGPGQAF

SEQ ID NO: 16124 - protein, 10 aa, Artificial Sequence
  Description of Artificial Sequence: Synthetic peptide
DQILIEISGK

SEQ ID NO: 16125 - protein, 10 aa, Artificial Sequence
  Description of Artificial Sequence: Synthetic peptide
KSLFGNDQSK

SEQ ID NO: 16126 - protein, 9 aa, Artificial Sequence
  Description of Artificial Sequence: Synthetic peptide
DRVIEVAQR

SEQ ID NO: 16127 - protein, 11 aa, Artificial Sequence
  Description of Artificial Sequence: Synthetic peptide
YATDAIIGDIR

SEQ ID NO: 16128 - protein, 9 aa, Artificial Sequence
  Description of Artificial Sequence: Synthetic peptide
GDSPLPEAR

SEQ ID NO: 16129 - protein, 10 aa, Artificial Sequence
  Description of Artificial Sequence: Synthetic peptide
TYYVDGAANR

SEQ ID NO: 16130 - protein, 9 aa, Artificial Sequence
  Description of Artificial Sequence: Synthetic peptide
GLDGLIYSK

SEQ ID NO: 16131 - protein, 10 aa, Artificial Sequence
  Description of Artificial Sequence: Synthetic peptide
GGLEGLIYSK

SEQ ID NO: 16132 - protein, 10 aa, Artificial Sequence
  Description of Artificial Sequence: Synthetic peptide
GNSNPVSQNY

SEQ ID NO: 16133 - protein, 9 aa, Artificial Sequence
  Description of Artificial Sequence: Synthetic peptide
HLGPGQALY

SEQ ID NO: 16134 - protein, 8 aa, Artificial Sequence
  Description of Artificial Sequence: Synthetic peptide
QRVGQAMY

SEQ ID NO: 16135 - protein, 11 aa, Artificial Sequence
  Description of Artificial Sequence: Synthetic peptide
GDNNSTSEIFR

SEQ ID NO: 16136 - protein, 9 aa, Artificial Sequence
  Description of Artificial Sequence: Synthetic peptide
SRIGIIPQR

SEQ ID NO: 16137 - protein, 9 aa, Artificial Sequence
  Description of Artificial Sequence: Synthetic peptide
SRIGITPQR

SEQ ID NO: 16138 - protein, 9 aa, Artificial Sequence
  Description of Artificial Sequence: Synthetic peptide
ARVLAVERY

SEQ ID NO: 16139 - protein, 9 aa, Artificial Sequence
  Description of Artificial Sequence: Synthetic peptide
GRNSSANNY

SEQ ID NO: 16140 - protein, 9 aa, Artificial Sequence
  Description of Artificial Sequence: Synthetic peptide
GRAVLNIPR

SEQ ID NO: 16141 - protein, 10 aa, Artificial Sequence
  Description of Artificial Sequence: Synthetic peptide
IRFGPGQAFY

SEQ ID NO: 16142 - protein, 9 aa, Artificial Sequence
  Description of Artificial Sequence: Synthetic peptide
IRFGPGQAF

SEQ ID NO: 16143 - protein, 9 aa, Artificial Sequence
  Description of Artificial Sequence: Synthetic peptide
SRIGITPRR

SEQ ID NO: 16144 - protein, 9 aa, Artificial Sequence
  Description of Artificial Sequence: Synthetic peptide
QRIEVKDTK

SEQ ID NO: 16145 - protein, 11 aa, Artificial Sequence
  Description of Artificial Sequence: Synthetic peptide
GRNSSANNYRL

SEQ ID NO: 16146 - protein, 9 aa, Artificial Sequence
  Description of Artificial Sequence: Synthetic peptide
EPIPGVETY

SEQ ID NO: 16147 - protein, 9 aa, Artificial Sequence
  Description of Artificial Sequence: Synthetic peptide
EPIPGAETY

SEQ ID NO: 16148 - protein, 9 aa, Artificial Sequence
  Description of Artificial Sequence: Synthetic peptide
EPIIGAETY

SEQ ID NO: 16149 - protein, 9 aa, Artificial Sequence
  Description of Artificial Sequence: Synthetic peptide
IPIGPGQAF

SEQ ID NO: 16150 - protein, 11 aa, Artificial Sequence
  Description of Artificial Sequence: Synthetic peptide
VPISNGNKTSY

SEQ ID NO: 16151 - protein, 11 aa, Artificial Sequence
  Description of Artificial Sequence: Synthetic peptide
IPAETGQETAY

SEQ ID NO: 16152 - protein, 9 aa, Artificial Sequence
  Description of Artificial Sequence: Synthetic peptide
NPEMVIYQY

SEQ ID NO: 16153 - protein, 9 aa, Artificial Sequence
  Description of Artificial Sequence: Synthetic peptide
NPEIVIYQY

SEQ ID NO: 16154 - protein, 9 aa, Artificial Sequence
  Description of Artificial Sequence: Synthetic peptide
DATLVVRTY

SEQ ID NO: 16155 - protein, 9 aa, Artificial Sequence
  Description of Artificial Sequence: Synthetic peptide
QASGATIMM

SEQ ID NO: 16156 - protein, 9 aa, Artificial Sequence
  Description of Artificial Sequence: Synthetic peptide
TVLDVGDAY

SEQ ID NO: 16157 - protein, 11 aa, Artificial Sequence
  Description of Artificial Sequence: Synthetic peptide
NANNASETETF

SEQ ID NO: 16158 - protein, 9 aa, Artificial Sequence
  Description of Artificial Sequence: Synthetic peptide
VAIGPGQAF

SEQ ID NO: 16159 - protein, 9 aa, Artificial Sequence
  Description of Artificial Sequence: Synthetic peptide
PPVPVGEIY

SEQ ID NO: 16160 - protein, 10 aa, Artificial Sequence
  Description of Artificial Sequence: Synthetic peptide
EPIPGVETYY

SEQ ID NO: 16161 - protein, 10 aa, Artificial Sequence
  Description of Artificial Sequence: Synthetic peptide
IPIGPGQAFY

SEQ ID NO: 16162 - protein, 9 aa, Artificial Sequence
  Description of Artificial Sequence: Synthetic peptide
VPLTAEAEM

SEQ ID NO: 16163 - protein, 8 aa, Artificial Sequence
  Description of Artificial Sequence: Synthetic peptide
DPWVGNNL

SEQ ID NO: 16164 - protein, 9 aa, Artificial Sequence
  Description of Artificial Sequence: Synthetic peptide
PPIPVGEIY

SEQ ID NO: 16165 - protein, 8 aa, Artificial Sequence
  Description of Artificial Sequence: Synthetic peptide
DPWVGDNL

SEQ ID NO: 16166 - protein, 9 aa, Artificial Sequence
  Description of Artificial Sequence: Synthetic peptide
TAEGCVQIM

SEQ ID NO: 16167 - protein, 10 aa, Artificial Sequence
  Description of Artificial Sequence: Synthetic peptide
EPIPGAETYY

SEQ ID NO: 16168 - protein, 10 aa, Artificial Sequence
  Description of Artificial Sequence: Synthetic peptide
NPPVPVGEIY

SEQ ID NO: 16169 - protein, 10 aa, Artificial Sequence
  Description of Artificial Sequence: Synthetic peptide
IPMKNVTENF

SEQ ID NO: 16170 - protein, 10 aa, Artificial Sequence
  Description of Artificial Sequence: Synthetic peptide
NPPIPVGEIY

SEQ ID NO: 16171 - protein, 10 aa, Artificial Sequence
  Description of Artificial Sequence: Synthetic peptide
VPLDENFRKY

SEQ ID NO: 16172 - protein, 9 aa, Artificial Sequence
  Description of Artificial Sequence: Synthetic peptide
NSNPVSQNY

SEQ ID NO: 16173 - protein, 9 aa, Artificial Sequence
  Description of Artificial Sequence: Synthetic peptide
SPAIFQSSM

SEQ ID NO: 16174 - protein, 10 aa, Artificial Sequence
  Description of Artificial Sequence: Synthetic peptide
IPLGNVTENF

SEQ ID NO: 16175 - protein, 9 aa, Artificial Sequence
  Description of Artificial Sequence: Synthetic peptide
DPSPQEINM

SEQ ID NO: 16176 - protein, 9 aa, Artificial Sequence
  Description of Artificial Sequence: Synthetic peptide
DAKLVVSTY

SEQ ID NO: 16177 - protein, 9 aa, Artificial Sequence
  Description of Artificial Sequence: Synthetic peptide
STRNITEEY

SEQ ID NO: 16178 - protein, 10 aa, Artificial Sequence
  Description of Artificial Sequence: Synthetic peptide
VPLDESFRKY

SEQ ID NO: 16179 - protein, 10 aa, Artificial Sequence
  Description of Artificial Sequence: Synthetic peptide
TAANNPDCAW

SEQ ID NO: 16180 - protein, 9 aa, Artificial Sequence
  Description of Artificial Sequence: Synthetic peptide
DPNPQEIPM

SEQ ID NO: 16181 - protein, 9 aa, Artificial Sequence
  Description of Artificial Sequence: Synthetic peptide
TGAAAAIMM

SEQ ID NO: 16182 - protein, 8 aa, Artificial Sequence
  Description of Artificial Sequence: Synthetic peptide
DPWIGDNL

SEQ ID NO: 16183 - protein, 9 aa, Artificial Sequence
  Description of Artificial Sequence: Synthetic peptide
TQNPEIVIY

SEQ ID NO: 16184 - protein, 9 aa, Artificial Sequence
  Description of Artificial Sequence: Synthetic peptide
SAEPVPLQL

SEQ ID NO: 16185 - protein, 9 aa, Artificial Sequence
  Description of Artificial Sequence: Synthetic peptide
FPISPIETV

SEQ ID NO: 16186 - protein, 9 aa, Artificial Sequence
  Description of Artificial Sequence: Synthetic peptide
NVTENFNVW

SEQ ID NO: 16187 - protein, 9 aa, Artificial Sequence
  Description of Artificial Sequence: Synthetic peptide
DPDPQEIPL

SEQ ID NO: 16188 - protein, 9 aa, Artificial Sequence
  Description of Artificial Sequence: Synthetic peptide
DPNPQEIPM

SEQ ID NO: 16189 - protein, 9 aa, Artificial Sequence
  Description of Artificial Sequence: Synthetic peptide
QPDRSESEL

SEQ ID NO: 16190 - protein, 9 aa, Artificial Sequence
  Description of Artificial Sequence: Synthetic peptide
DPSPQEINM

SEQ ID NO: 16191 - protein, 9 aa, Artificial Sequence
  Description of Artificial Sequence: Synthetic peptide
VPLTAEAEM

SEQ ID NO: 16192 - protein, 9 aa, Artificial Sequence
  Description of Artificial Sequence: Synthetic peptide
QPQGTEPGL

SEQ ID NO: 16193 - protein, 9 aa, Artificial Sequence
  Description of Artificial Sequence: Synthetic peptide
YSTQVDPDL

SEQ ID NO: 16194 - protein, 9 aa, Artificial Sequence
  Description of Artificial Sequence: Synthetic peptide
SAEPVPLQL

SEQ ID NO: 16195 - protein, 9 aa, Artificial Sequence
  Description of Artificial Sequence: Synthetic peptide
YSTQIDPDL

SEQ ID NO: 16196 - protein, 11 aa, Artificial Sequence
  Description of Artificial Sequence: Synthetic peptide
VPVWEDADTTL

SEQ ID NO: 16197 - protein, 9 aa, Artificial Sequence
  Description of Artificial Sequence: Synthetic peptide
TAEGCVQIM

SEQ ID NO: 16198 - protein, 9 aa, Artificial Sequence
  Description of Artificial Sequence: Synthetic peptide
VPLTAEAEL

SEQ ID NO: 16199 - protein, 9 aa, Artificial Sequence
  Description of Artificial Sequence: Synthetic peptide
TAEGCQQIM

SEQ ID NO: 16200 - protein, 9 aa, Artificial Sequence
  Description of Artificial Sequence: Synthetic peptide
MTAEAEMEL

SEQ ID NO: 16201 - protein, 9 aa, Artificial Sequence
  Description of Artificial Sequence: Synthetic peptide
IPIGPGQAF

SEQ ID NO: 16202 - protein, 8 aa, Artificial Sequence
  Description of Artificial Sequence: Synthetic peptide
DADKEVLV

SEQ ID NO: 16203 - protein, 8 aa, Artificial Sequence
  Description of Artificial Sequence: Synthetic peptide
DPWVGDNL

SEQ ID NO: 16204 - protein, 9 aa, Artificial Sequence
  Description of Artificial Sequence: Synthetic peptide
QPDRSGSEL

SEQ ID NO: 16205 - protein, 9 aa, Artificial Sequence
  Description of Artificial Sequence: Synthetic peptide
FPISPIETV

SEQ ID NO: 16206 - protein, 9 aa, Artificial Sequence
  Description of Artificial Sequence: Synthetic peptide
IPIGPGQAF

SEQ ID NO: 16207 - protein, 9 aa, Artificial Sequence
  Description of Artificial Sequence: Synthetic peptide
QASGATIMM

SEQ ID NO: 16208 - protein, 9 aa, Artificial Sequence
  Description of Artificial Sequence: Synthetic peptide
VPLTAEAEL

SEQ ID NO: 16209 - protein, 9 aa, Artificial Sequence
  Description of Artificial Sequence: Synthetic peptide
FPISPIETV

SEQ ID NO: 16210 - protein, 9 aa, Artificial Sequence
  Description of Artificial Sequence: Synthetic peptide
VPLTAEAEM

SEQ ID NO: 16211 - protein, 9 aa, Artificial Sequence
  Description of Artificial Sequence: Synthetic peptide
SAEPVPLQL

SEQ ID NO: 16212 - protein, 11 aa, Artificial Sequence
  Description of Artificial Sequence: Synthetic peptide
VPVWEDADTTL

SEQ ID NO: 16213 - protein, 9 aa, Artificial Sequence
  Description of Artificial Sequence: Synthetic peptide
DPNPQEIPM

SEQ ID NO: 16214 - protein, 9 aa, Artificial Sequence
  Description of Artificial Sequence: Synthetic peptide
TAEGCVQIM

SEQ ID NO: 16215 - protein, 9 aa, Artificial Sequence
  Description of Artificial Sequence: Synthetic peptide
YSTQVDPDL

SEQ ID NO: 16216 - protein, 9 aa, Artificial Sequence
  Description of Artificial Sequence: Synthetic peptide
YSTQIDPDL

SEQ ID NO: 16217 - protein, 9 aa, Artificial Sequence
  Description of Artificial Sequence: Synthetic peptide
TPQDLNTML

SEQ ID NO: 16218 - protein, 9 aa, Artificial Sequence
  Description of Artificial Sequence: Synthetic peptide
QPQGTEPGL

SEQ ID NO: 16219 - protein, 8 aa, Artificial Sequence
  Description of Artificial Sequence: Synthetic peptide
DPWVGNNL

SEQ ID NO: 16220 - protein, 9 aa, Artificial Sequence
  Description of Artificial Sequence: Synthetic peptide
LPIAGNLVC

SEQ ID NO: 16221 - protein, 8 aa, Artificial Sequence
  Description of Artificial Sequence: Synthetic peptide
DPWVGDNL

SEQ ID NO: 16222 - protein, 9 aa, Artificial Sequence
  Description of Artificial Sequence: Synthetic peptide
DPSPQEINM

SEQ ID NO: 16223 - protein, 9 aa, Artificial Sequence
  Description of Artificial Sequence: Synthetic peptide
IVTDSQYAL

SEQ ID NO: 16224 - protein, 10 aa, Artificial Sequence
  Description of Artificial Sequence: Synthetic peptide
SPIETVPVKL

SEQ ID NO: 16225 - protein, 9 aa, Artificial Sequence
  Description of Artificial Sequence: Synthetic peptide
SALFNSSSL

SEQ ID NO: 16226 - protein, 9 aa, Artificial Sequence
  Description of Artificial Sequence: Synthetic peptide
HPQQAGPIA

SEQ ID NO: 16227 - protein, 9 aa, Artificial Sequence
  Description of Artificial Sequence: Synthetic peptide
TAEGCQQIM

SEQ ID NO: 16228 - protein, 9 aa, Artificial Sequence
  Description of Artificial Sequence: Synthetic peptide
DPDPQEIPL

SEQ ID NO: 16229 - protein, 9 aa, Artificial Sequence
  Description of Artificial Sequence: Synthetic peptide
TANGTDRVI

SEQ ID NO: 16230 - protein, 9 aa, Artificial Sequence
  Description of Artificial Sequence: Synthetic peptide
MIVGGLISL

SEQ ID NO: 16231 - protein, 8 aa, Artificial Sequence
  Description of Artificial Sequence: Synthetic peptide
DPWIGDNL

SEQ ID NO: 16232 - protein, 10 aa, Artificial Sequence
  Description of Artificial Sequence: Synthetic peptide
NANPDCKTIL

SEQ ID NO: 16233 - protein, 9 aa, Artificial Sequence
  Description of Artificial Sequence: Synthetic peptide
MTAEAEMEL

SEQ ID NO: 16234 - protein, 11 aa, Artificial Sequence
  Description of Artificial Sequence: Synthetic peptide
VPVWEDAKTTL

SEQ ID NO: 16235 - protein, 8 aa, Artificial Sequence
  Description of Artificial Sequence: Synthetic peptide
TPGPGTRL

SEQ ID NO: 16236 - protein, 11 aa, Artificial Sequence
  Description of Artificial Sequence: Synthetic peptide
VPLTAEAELEL

SEQ ID NO: 16237 - protein, 10 aa, Artificial Sequence
  Description of Artificial Sequence: Synthetic peptide
NANPDCKIIL

SEQ ID NO: 16238 - protein, 9 aa, Artificial Sequence
  Description of Artificial Sequence: Synthetic peptide
YPLSSLKSL

SEQ ID NO: 16239 - protein, 11 aa, Artificial Sequence
  Description of Artificial Sequence: Synthetic peptide
IPAETGQETAY

SEQ ID NO: 16240 - protein, 9 aa, Artificial Sequence
  Description of Artificial Sequence: Synthetic peptide
EPIPGVETY

SEQ ID NO: 16241 - protein, 9 aa, Artificial Sequence
  Description of Artificial Sequence: Synthetic peptide
EPIPGAETY

SEQ ID NO: 16242 - protein, 9 aa, Artificial Sequence
  Description of Artificial Sequence: Synthetic peptide
IPIGPGQAF

SEQ ID NO: 16243 - protein, 9 aa, Artificial Sequence
  Description of Artificial Sequence: Synthetic peptide
EPIIGAETY

SEQ ID NO: 16244 - protein, 11 aa, Artificial Sequence
  Description of Artificial Sequence: Synthetic peptide
NANNASETETF

SEQ ID NO: 16245 - protein, 11 aa, Artificial Sequence
  Description of Artificial Sequence: Synthetic peptide
VPISNGNKTSY

SEQ ID NO: 16246 - protein, 9 aa, Artificial Sequence
  Description of Artificial Sequence: Synthetic peptide
VPLTAEAEM

SEQ ID NO: 16247 - protein, 9 aa, Artificial Sequence
  Description of Artificial Sequence: Synthetic peptide
NPEIVIYQY

SEQ ID NO: 16248 - protein, 9 aa, Artificial Sequence
  Description of Artificial Sequence: Synthetic peptide
NPEMVIYQY

SEQ ID NO: 16249 - protein, 9 aa, Artificial Sequence
  Description of Artificial Sequence: Synthetic peptide
DPNPQEIPM

SEQ ID NO: 16250 - protein, 9 aa, Artificial Sequence
  Description of Artificial Sequence: Synthetic peptide
FSVPLDESF

SEQ ID NO: 16251 - protein, 10 aa, Artificial Sequence
  Description of Artificial Sequence: Synthetic peptide
EPIPGVETYY

SEQ ID NO: 16252 - protein, 10 aa, Artificial Sequence
  Description of Artificial Sequence: Synthetic peptide
EPIPGAETYY

SEQ ID NO: 16253 - protein, 9 aa, Artificial Sequence
  Description of Artificial Sequence: Synthetic peptide
TVLDVGDAY

SEQ ID NO: 16254 - protein, 10 aa, Artificial Sequence
  Description of Artificial Sequence: Synthetic peptide
NPPVPVGEIY

SEQ ID NO: 16255 - protein, 10 aa, Artificial Sequence
  Description of Artificial Sequence: Synthetic peptide
NPPIPVGEIY

SEQ ID NO: 16256 - protein, 9 aa, Artificial Sequence
  Description of Artificial Sequence: Synthetic peptide
VAIGPGQAF

SEQ ID NO: 16257 - protein, 9 aa, Artificial Sequence
  Description of Artificial Sequence: Synthetic peptide
DPNPQEIPM

SEQ ID NO: 16258 - protein, 9 aa, Artificial Sequence
  Description of Artificial Sequence: Synthetic peptide
DPDPQEIPL

SEQ ID NO: 16259 - protein, 9 aa, Artificial Sequence
  Description of Artificial Sequence: Synthetic peptide
DPSPQEINM

SEQ ID NO: 16260 - protein, 9 aa, Artificial Sequence
  Description of Artificial Sequence: Synthetic peptide
VPLTAEAEM

SEQ ID NO: 16261 - protein, 9 aa, Artificial Sequence
  Description of Artificial Sequence: Synthetic peptide
QPDRSESEL

SEQ ID NO: 16262 - protein, 9 aa, Artificial Sequence
  Description of Artificial Sequence: Synthetic peptide
VPLTAEAEL

SEQ ID NO: 16263 - protein, 9 aa, Artificial Sequence
  Description of Artificial Sequence: Synthetic peptide
IPIGPGQAF

SEQ ID NO: 16264 - protein, 9 aa, Artificial Sequence
  Description of Artificial Sequence: Synthetic peptide
SAEPVPLQL

SEQ ID NO: 16265 - protein, 11 aa, Artificial Sequence
  Description of Artificial Sequence: Synthetic peptide
VPVWEDADTTL

SEQ ID NO: 16266 - protein, 9 aa, Artificial Sequence
  Description of Artificial Sequence: Synthetic peptide
QPQGTEPGL

SEQ ID NO: 16267 - protein, 9 aa, Artificial Sequence
  Description of Artificial Sequence: Synthetic peptide
TAEGCVQIM

SEQ ID NO: 16268 - protein, 9 aa, Artificial Sequence
  Description of Artificial Sequence: Synthetic peptide
YSTQVDPDL

SEQ ID NO: 16269 - protein, 9 aa, Artificial Sequence
  Description of Artificial Sequence: Synthetic peptide
TAEGCQQIM

SEQ ID NO: 16270 - protein, 9 aa, Artificial Sequence
  Description of Artificial Sequence: Synthetic peptide
YSTQIDPDL

SEQ ID NO: 16271 - protein, 9 aa, Artificial Sequence
  Description of Artificial Sequence: Synthetic peptide
QASGATIMM

SEQ ID NO: 16272 - protein, 8 aa, Artificial Sequence
  Description of Artificial Sequence: Synthetic peptide
DPWVGDNL

SEQ ID NO: 16273 - protein, 8 aa, Artificial Sequence
  Description of Artificial Sequence: Synthetic peptide
DPDLADQL

SEQ ID NO: 16274 - protein, 9 aa, Artificial Sequence
  Description of Artificial Sequence: Synthetic peptide
FPISPIETV

SEQ ID NO: 16275 - protein, 8 aa, Artificial Sequence
  Description of Artificial Sequence: Synthetic peptide
DPDLADHL

SEQ ID NO: 16276 - protein, 9 aa, Artificial Sequence
  Description of Artificial Sequence: Synthetic peptide
QPDRSGSEL

SEQ ID NO: 16277 - protein, 9 aa, Artificial Sequence
  Description of Artificial Sequence: Synthetic peptide
FSVPLDESF

SEQ ID NO: 16278 - protein, 9 aa, Artificial Sequence
  Description of Artificial Sequence: Synthetic peptide
LPDKESWTV

SEQ ID NO: 16279 - protein, 9 aa, Artificial Sequence
  Description of Artificial Sequence: Synthetic peptide
LPIAGNLVC

SEQ ID NO: 16280 - protein, 9 aa, Artificial Sequence
  Description of Artificial Sequence: Synthetic peptide
QPNKSESEL

SEQ ID NO: 16281 - protein, 8 aa, Artificial Sequence
  Description of Artificial Sequence: Synthetic peptide
IENVTENF

SEQ ID NO: 16282 - protein, 8 aa, Artificial Sequence
  Description of Artificial Sequence: Synthetic peptide
IDTVAIAV

SEQ ID NO: 16283 - protein, 9 aa, Artificial Sequence
  Description of Artificial Sequence: Synthetic peptide
QDLARHGAI

SEQ ID NO: 16284 - protein, 8 aa, Artificial Sequence
  Description of Artificial Sequence: Synthetic peptide
AEHLKTAV

SEQ ID NO: 16285 - protein, 8 aa, Artificial Sequence
  Description of Artificial Sequence: Synthetic peptide
AELQAIQL

SEQ ID NO: 16286 - protein, 9 aa, Artificial Sequence
  Description of Artificial Sequence: Synthetic peptide
QTPVPKQPF

SEQ ID NO: 16287 - protein, 9 aa, Artificial Sequence
  Description of Artificial Sequence: Synthetic peptide
TDVVPINEM

SEQ ID NO: 16288 - protein, 9 aa, Artificial Sequence
  Description of Artificial Sequence: Synthetic peptide
REPDRPAGI

SEQ ID NO: 16289 - protein, 8 aa, Artificial Sequence
  Description of Artificial Sequence: Synthetic peptide
AELHAIQL

SEQ ID NO: 16290 - protein, 8 aa, Artificial Sequence
  Description of Artificial Sequence: Synthetic peptide
KEFNGTGL

SEQ ID NO: 16291 - protein, 8 aa, Artificial Sequence
  Description of Artificial Sequence: Synthetic peptide
SDIQTKEL

SEQ ID NO: 16292 - protein, 9 aa, Artificial Sequence
  Description of Artificial Sequence: Synthetic peptide
YHDPSKELI

SEQ ID NO: 16293 - protein, 9 aa, Artificial Sequence
  Description of Artificial Sequence: Synthetic peptide
QHSRIGITL

SEQ ID NO: 16294 - protein, 9 aa, Artificial Sequence
  Description of Artificial Sequence: Synthetic peptide
IHTDNGPNF

SEQ ID NO: 16295 - protein, 9 aa, Artificial Sequence
  Description of Artificial Sequence: Synthetic peptide
AHSTESHNI

SEQ ID NO: 16296 - protein, 9 aa, Artificial Sequence
  Description of Artificial Sequence: Synthetic peptide
IHTDNGSNF

SEQ ID NO: 16297 - protein, 11 aa, Artificial Sequence
  Description of Artificial Sequence: Synthetic peptide
TQIDPDLADQL

SEQ ID NO: 16298 - protein, 9 aa, Artificial Sequence
  Description of Artificial Sequence: Synthetic peptide
IHLGPGQAL

SEQ ID NO: 16299 - protein, 9 aa, Artificial Sequence
  Description of Artificial Sequence: Synthetic peptide
TQDFWEVQL

SEQ ID NO: 16300 - protein, 11 aa, Artificial Sequence
  Description of Artificial Sequence: Synthetic peptide
QIDPNTADHLI

SEQ ID NO: 16301 - protein, 10 aa, Artificial Sequence
  Description of Artificial Sequence: Synthetic peptide
IHTDNGPNFI

SEQ ID NO: 16302 - protein, 11 aa, Artificial Sequence
  Description of Artificial Sequence: Synthetic peptide
TQIDPNTADHL

SEQ ID NO: 16303 - protein, 11 aa, Artificial Sequence
  Description of Artificial Sequence: Synthetic peptide
TQVDPDLADHL

SEQ ID NO: 16304 - protein, 9 aa, Artificial Sequence
  Description of Artificial Sequence: Synthetic peptide
NHTEANNTV

SEQ ID NO: 16305 - protein, 9 aa, Artificial Sequence
  Description of Artificial Sequence: Synthetic peptide
THLEGKIII

SEQ ID NO: 16306 - protein, 9 aa, Artificial Sequence
  Description of Artificial Sequence: Synthetic peptide
GHQAAMQML

SEQ ID NO: 16307 - protein, 9 aa, Artificial Sequence
  Description of Artificial Sequence: Synthetic peptide
THLEGKIIL

SEQ ID NO: 16308 - protein, 9 aa, Artificial Sequence
  Description of Artificial Sequence: Synthetic peptide
AHTNDVKQL

SEQ ID NO: 16309 - protein, 9 aa, Artificial Sequence
  Description of Artificial Sequence: Synthetic peptide
EHLKTAVQM

SEQ ID NO: 16310 - protein, 8 aa, Artificial Sequence
  Description of Artificial Sequence: Synthetic peptide
YHDPSKEL

SEQ ID NO: 16311 - protein, 9 aa, Artificial Sequence
  Description of Artificial Sequence: Synthetic peptide
NHTEANNTV

SEQ ID NO: 16312 - protein, 11 aa, Artificial Sequence
  Description of Artificial Sequence: Synthetic peptide
TQIDPDLADQL

SEQ ID NO: 16313 - protein, 9 aa, Artificial Sequence
  Description of Artificial Sequence: Synthetic peptide
QHSRIGITL

SEQ ID NO: 16314 - protein, 9 aa, Artificial Sequence
  Description of Artificial Sequence: Synthetic peptide
EHLKTAVQM

SEQ ID NO: 16315 - protein, 9 aa, Artificial Sequence
  Description of Artificial Sequence: Synthetic peptide
IHLGPGQAL

SEQ ID NO: 16316 - protein, 8 aa, Artificial Sequence
  Description of Artificial Sequence: Synthetic peptide
YHDPSKEL

SEQ ID NO: 16317 - protein, 11 aa, Artificial Sequence
  Description of Artificial Sequence: Synthetic peptide
TQIDPNTADHL

SEQ ID NO: 16318 - protein, 11 aa, Artificial Sequence
  Description of Artificial Sequence: Synthetic peptide
TQVDPDLADHL

SEQ ID NO: 16319 - protein, 9 aa, Artificial Sequence
  Description of Artificial Sequence: Synthetic peptide
IHTDNGPNF

SEQ ID NO: 16320 - protein, 9 aa, Artificial Sequence
  Description of Artificial Sequence: Synthetic peptide
IHTDNGSNF

SEQ ID NO: 16321 - protein, 9 aa, Artificial Sequence
  Description of Artificial Sequence: Synthetic peptide
HQAISPRTL

SEQ ID NO: 16322 - protein, 8 aa, Artificial Sequence
  Description of Artificial Sequence: Synthetic peptide
MRQLQPAL

SEQ ID NO: 16323 - protein, 9 aa, Artificial Sequence
  Description of Artificial Sequence: Synthetic peptide
YHDPSKELI

SEQ ID NO: 16324 - protein, 9 aa, Artificial Sequence
  Description of Artificial Sequence: Synthetic peptide
ERIRQTPVA

SEQ ID NO: 16325 - protein, 9 aa, Artificial Sequence
  Description of Artificial Sequence: Synthetic peptide
SQQKIQQAA

SEQ ID NO: 16326 - protein, 9 aa, Artificial Sequence
  Description of Artificial Sequence: Synthetic peptide
SQQEIQQAA

SEQ ID NO: 16327 - protein, 10 aa, Artificial Sequence
  Description of Artificial Sequence: Synthetic peptide
SQYALGIIQA

SEQ ID NO: 16328 - protein, 9 aa, Artificial Sequence
  Description of Artificial Sequence: Synthetic peptide
VQLGIPHPA

SEQ ID NO: 16329 - protein, 8 aa, Artificial Sequence
  Description of Artificial Sequence: Synthetic peptide
SQQKIQQA

SEQ ID NO: 16330 - protein, 8 aa, Artificial Sequence
  Description of Artificial Sequence: Synthetic peptide
THGIKPVV

SEQ ID NO: 16331 - protein, 9 aa, Artificial Sequence
  Description of Artificial Sequence: Synthetic peptide
QNYPIVQNA

SEQ ID NO: 16332 - protein, 8 aa, Artificial Sequence
  Description of Artificial Sequence: Synthetic peptide
TDIVPLTA

SEQ ID NO: 16333 - protein, 9 aa, Artificial Sequence
  Description of Artificial Sequence: Synthetic peptide
DNGPNFISA

SEQ ID NO: 16334 - protein, 9 aa, Artificial Sequence
  Description of Artificial Sequence: Synthetic peptide
ENMKQNVTA

SEQ ID NO: 16335 - protein, 8 aa, Artificial Sequence
  Description of Artificial Sequence: Synthetic peptide
WQRPLVTV

SEQ ID NO: 16336 - protein, 10 aa, Artificial Sequence
  Description of Artificial Sequence: Synthetic peptide
ERIRQTPVAA

SEQ ID NO: 16337 - protein, 8 aa, Artificial Sequence
  Description of Artificial Sequence: Synthetic peptide
DQILIEIC

SEQ ID NO: 16338 - protein, 8 aa, Artificial Sequence
  Description of Artificial Sequence: Synthetic peptide
IRQTPVAA

SEQ ID NO: 16339 - protein, 9 aa, Artificial Sequence
  Description of Artificial Sequence: Synthetic peptide
NETVPITCA

SEQ ID NO: 16340 - protein, 8 aa, Artificial Sequence
  Description of Artificial Sequence: Synthetic peptide
TRPPLPSV

SEQ ID NO: 16341 - protein, 9 aa, Artificial Sequence
  Description of Artificial Sequence: Synthetic peptide
NGPNFISAA

SEQ ID NO: 16342 - protein, 8 aa, Artificial Sequence
  Description of Artificial Sequence: Synthetic peptide
GKIIIVAV

SEQ ID NO: 16343 - protein, 8 aa, Artificial Sequence
  Description of Artificial Sequence: Synthetic peptide
QQKIQQAA

SEQ ID NO: 16344 - protein, 9 aa, Artificial Sequence
  Description of Artificial Sequence: Synthetic peptide
QRVGQAMYA

SEQ ID NO: 16345 - protein, 8 aa, Artificial Sequence
  Description of Artificial Sequence: Synthetic peptide
SQQEIQQA

SEQ ID NO: 16346 - protein, 9 aa, Artificial Sequence
  Description of Artificial Sequence: Synthetic peptide
QQHLLQLTV

SEQ ID NO: 16347 - protein, 8 aa, Artificial Sequence
  Description of Artificial Sequence: Synthetic peptide
ETVPITCA

SEQ ID NO: 16348 - protein, 8 aa, Artificial Sequence
  Description of Artificial Sequence: Synthetic peptide
EMLKNVTA

SEQ ID NO: 16349 - protein, 8 aa, Artificial Sequence
  Description of Artificial Sequence: Synthetic peptide
TDIVSMTA

SEQ ID NO: 16350 - protein, 9 aa, Artificial Sequence
  Description of Artificial Sequence: Synthetic peptide
SENNDTITL

SEQ ID NO: 16351 - protein, 10 aa, Artificial Sequence
  Description of Artificial Sequence: Synthetic peptide
IEVKDTKEAL

SEQ ID NO: 16352 - protein, 10 aa, Artificial Sequence
  Description of Artificial Sequence: Synthetic peptide
TETTNQKAEL

SEQ ID NO: 16353 - protein, 10 aa, Artificial Sequence
  Description of Artificial Sequence: Synthetic peptide
TETTNQKTEL

SEQ ID NO: 16354 - protein, 9 aa, Artificial Sequence
  Description of Artificial Sequence: Synthetic peptide
MEDADKEVL

SEQ ID NO: 16355 - protein, 9 aa, Artificial Sequence
  Description of Artificial Sequence: Synthetic peptide
MEDEDREVL

SEQ ID NO: 16356 - protein, 9 aa, Artificial Sequence
  Description of Artificial Sequence: Synthetic peptide
AEGKGDTSL

SEQ ID NO: 16357 - protein, 10 aa, Artificial Sequence
  Description of Artificial Sequence: Synthetic peptide
IEVRDTKEAL

SEQ ID NO: 16358 - protein, 8 aa, Artificial Sequence
  Description of Artificial Sequence: Synthetic peptide
KEFNGTGL

SEQ ID NO: 16359 - protein, 9 aa, Artificial Sequence
  Description of Artificial Sequence: Synthetic peptide
SEGATPQDL

SEQ ID NO: 16360 - protein, 9 aa, Artificial Sequence
  Description of Artificial Sequence: Synthetic peptide
AEGQGVIPL

SEQ ID NO: 16361 - protein, 8 aa, Artificial Sequence
  Description of Artificial Sequence: Synthetic peptide
AELQAIQL

SEQ ID NO: 16362 - protein, 9 aa, Artificial Sequence
  Description of Artificial Sequence: Synthetic peptide
SESAIRNAI

SEQ ID NO: 16363 - protein, 8 aa, Artificial Sequence
  Description of Artificial Sequence: Synthetic peptide
IETVPVKL

SEQ ID NO: 16364 - protein, 9 aa, Artificial Sequence
  Description of Artificial Sequence: Synthetic peptide
MEDEDGEVL

SEQ ID NO: 16365 - protein, 10 aa, Artificial Sequence
  Description of Artificial Sequence: Synthetic peptide
KEAPEEVEKI

SEQ ID NO: 16366 - protein, 9 aa, Artificial Sequence
  Description of Artificial Sequence: Synthetic peptide
VELLGHNSL

SEQ ID NO: 16367 - protein, 8 aa, Artificial Sequence
  Description of Artificial Sequence: Synthetic peptide
AELHAIQL

SEQ ID NO: 16368 - protein, 9 aa, Artificial Sequence
  Description of Artificial Sequence: Synthetic peptide
KEIHPLASL

SEQ ID NO: 16369 - protein, 10 aa, Artificial Sequence
  Description of Artificial Sequence: Synthetic peptide
SESAIRNAIL

SEQ ID NO: 16370 - protein, 10 aa, Artificial Sequence
  Description of Artificial Sequence: Synthetic peptide
TEIGVGSPQI

SEQ ID NO: 16371 - protein, 9 aa, Artificial Sequence
  Description of Artificial Sequence: Synthetic peptide
KELYPLTSL

SEQ ID NO: 16372 - protein, 9 aa, Artificial Sequence
  Description of Artificial Sequence: Synthetic peptide
QEKNEQDLL

SEQ ID NO: 16373 - protein, 11 aa, Artificial Sequence
  Description of Artificial Sequence: Synthetic peptide
SEIVNQIIEQL

SEQ ID NO: 16374 - protein, 11 aa, Artificial Sequence
  Description of Artificial Sequence: Synthetic peptide
IEFNSSSGGDL

SEQ ID NO: 16375 - protein, 9 aa, Artificial Sequence
  Description of Artificial Sequence: Synthetic peptide
LEISAIVGL

SEQ ID NO: 16376 - protein, 8 aa, Artificial Sequence
  Description of Artificial Sequence: Synthetic peptide
TELQAIQL

SEQ ID NO: 16377 - protein, 10 aa, Artificial Sequence
  Description of Artificial Sequence: Synthetic peptide
IEAQQHLLQL

SEQ ID NO: 16378 - protein, 9 aa, Artificial Sequence
  Description of Artificial Sequence: Synthetic peptide
VELLGRSSL

SEQ ID NO: 16379 - protein, 9 aa, Artificial Sequence
  Description of Artificial Sequence: Synthetic peptide
KELYPLSSL

SEQ ID NO: 16380 - protein, 9 aa, Artificial Sequence
  Description of Artificial Sequence: Synthetic peptide
SESEIVNQI

SEQ ID NO: 16381 - protein, 10 aa, Artificial Sequence
  Description of Artificial Sequence: Synthetic peptide
AEHLKTAVQM

SEQ ID NO: 16382 - protein, 10 aa, Artificial Sequence
  Description of Artificial Sequence: Synthetic peptide
TETGVGGPQI

SEQ ID NO: 16383 - protein, 8 aa, Artificial Sequence
  Description of Artificial Sequence: Synthetic peptide
IEAQQHLL

SEQ ID NO: 16384 - protein, 10 aa, Artificial Sequence
  Description of Artificial Sequence: Synthetic peptide
NESEGDREEL

SEQ ID NO: 16385 - protein, 9 aa, Artificial Sequence
  Description of Artificial Sequence: Synthetic peptide
SENNDTITL

SEQ ID NO: 16386 - protein, 8 aa, Artificial Sequence
  Description of Artificial Sequence: Synthetic peptide
AELQAIQL

SEQ ID NO: 16387 - protein, 8 aa, Artificial Sequence
  Description of Artificial Sequence: Synthetic peptide
SDIQTKEL

SEQ ID NO: 16388 - protein, 10 aa, Artificial Sequence
  Description of Artificial Sequence: Synthetic peptide
TETTNQKTEL

SEQ ID NO: 16389 - protein, 11 aa, Artificial Sequence
  Description of Artificial Sequence: Synthetic peptide
SEIVNQIIEQL

SEQ ID NO: 16390 - protein, 10 aa, Artificial Sequence
  Description of Artificial Sequence: Synthetic peptide
TETTNQKAEL

SEQ ID NO: 16391 - protein, 10 aa, Artificial Sequence
  Description of Artificial Sequence: Synthetic peptide
AEHLKTAVQM

SEQ ID NO: 16392 - protein, 9 aa, Artificial Sequence
  Description of Artificial Sequence: Synthetic peptide
NETVPITCA

SEQ ID NO: 16393 - protein, 9 aa, Artificial Sequence
  Description of Artificial Sequence: Synthetic peptide
VELLGHNSL

SEQ ID NO: 16394 - protein, 8 aa, Artificial Sequence
  Description of Artificial Sequence: Synthetic peptide
KEFNGTGL

SEQ ID NO: 16395 - protein, 8 aa, Artificial Sequence
  Description of Artificial Sequence: Synthetic peptide
AELHAIQL

SEQ ID NO: 16396 - protein, 9 aa, Artificial Sequence
  Description of Artificial Sequence: Synthetic peptide
NETVEITCV

SEQ ID NO: 16397 - protein, 9 aa, Artificial Sequence
  Description of Artificial Sequence: Synthetic peptide
SESAIRNAI

SEQ ID NO: 16398 - protein, 9 aa, Artificial Sequence
  Description of Artificial Sequence: Synthetic peptide
TDVVPINEM

SEQ ID NO: 16399 - protein, 10 aa, Artificial Sequence
  Description of Artificial Sequence: Synthetic peptide
TEIGVGSPQI

SEQ ID NO: 16400 - protein, 8 aa, Artificial Sequence
  Description of Artificial Sequence: Synthetic peptide
TELQAIQL

SEQ ID NO: 16401 - protein, 10 aa, Artificial Sequence
  Description of Artificial Sequence: Synthetic peptide
IEVKDTKEAL

SEQ ID NO: 16402 - protein, 10 aa, Artificial Sequence
  Description of Artificial Sequence: Synthetic peptide
GEVIGDIRKA

SEQ ID NO: 16403 - protein, 10 aa, Artificial Sequence
  Description of Artificial Sequence: Synthetic peptide
IEAQQHLLQL

SEQ ID NO: 16404 - protein, 10 aa, Artificial Sequence
  Description of Artificial Sequence: Synthetic peptide
SESAIRNAIL

SEQ ID NO: 16405 - protein, 10 aa, Artificial Sequence
  Description of Artificial Sequence: Synthetic peptide
TETGVGGPQI

SEQ ID NO: 16406 - protein, 8 aa, Artificial Sequence
  Description of Artificial Sequence: Synthetic peptide
IETVPVKL

SEQ ID NO: 16407 - protein, 9 aa, Artificial Sequence
  Description of Artificial Sequence: Synthetic peptide
SESEIVNQI

SEQ ID NO: 16408 - protein, 9 aa, Artificial Sequence
  Description of Artificial Sequence: Synthetic peptide
AEGKGDTSL

SEQ ID NO: 16409 - protein, 9 aa, Artificial Sequence
  Description of Artificial Sequence: Synthetic peptide
VELLGRNSL

SEQ ID NO: 16410 - protein, 9 aa, Artificial Sequence
  Description of Artificial Sequence: Synthetic peptide
KEIHPLASL

SEQ ID NO: 16411 - protein, 9 aa, Artificial Sequence
  Description of Artificial Sequence: Synthetic peptide
KELYPLTSL

SEQ ID NO: 16412 - protein, 10 aa, Artificial Sequence
  Description of Artificial Sequence: Synthetic peptide
TETGVGRPQV

SEQ ID NO: 16413 - protein, 9 aa, Artificial Sequence
  Description of Artificial Sequence: Synthetic peptide
SERVLSTCL

SEQ ID NO: 16414 - protein, 9 aa, Artificial Sequence
  Description of Artificial Sequence: Synthetic peptide
VELLGRSSL

SEQ ID NO: 16415 - protein, 8 aa, Artificial Sequence
  Description of Artificial Sequence: Synthetic peptide
SDFNLPHI

SEQ ID NO: 16416 - protein, 8 aa, Artificial Sequence
  Description of Artificial Sequence: Synthetic peptide
IEAQQHLL

SEQ ID NO: 16417 - protein, 9 aa, Artificial Sequence
  Description of Artificial Sequence: Synthetic peptide
AEGQGVIPL

SEQ ID NO: 16418 - protein, 9 aa, Artificial Sequence
  Description of Artificial Sequence: Synthetic peptide
SDFNLPPVV

SEQ ID NO: 16419 - protein, 9 aa, Artificial Sequence
  Description of Artificial Sequence: Synthetic peptide
SERILSTCL

SEQ ID NO: 16420 - protein, 9 aa, Artificial Sequence
  Description of Artificial Sequence: Synthetic peptide
LETEPIPGV

SEQ ID NO: 16421 - protein, 10 aa, Artificial Sequence
  Description of Artificial Sequence: Synthetic peptide
IEVRDTKEAL

SEQ ID NO: 16422 - protein, 9 aa, Artificial Sequence
  Description of Artificial Sequence: Synthetic peptide
MEDEDREVL

SEQ ID NO: 16423 - protein, 10 aa, Artificial Sequence
  Description of Artificial Sequence: Synthetic peptide
AELQAIQLAL

SEQ ID NO: 16424 - protein, 9 aa, Artificial Sequence
  Description of Artificial Sequence: Synthetic peptide
KELYPLSSL

SEQ ID NO: 16425 - protein, 11 aa, Artificial Sequence
  Description of Artificial Sequence: Synthetic peptide
SELVNQIIEQL

SEQ ID NO: 16426 - protein, 9 aa, Artificial Sequence
  Description of Artificial Sequence: Synthetic peptide
TEVVQKIAT

SEQ ID NO: 16427 - protein, 9 aa, Artificial Sequence
  Description of Artificial Sequence: Synthetic peptide
SEGATPQDL

SEQ ID NO: 16428 - protein, 10 aa, Artificial Sequence
  Description of Artificial Sequence: Synthetic peptide
KEAPEEVEKI

SEQ ID NO: 16429 - protein, 10 aa, Artificial Sequence
  Description of Artificial Sequence: Synthetic peptide
GEIMIRSENI

SEQ ID NO: 16430 - protein, 9 aa, Artificial Sequence
  Description of Artificial Sequence: Synthetic peptide
SESELVNQI

SEQ ID NO: 16431 - protein, 10 aa, Artificial Sequence
  Description of Artificial Sequence: Synthetic peptide
REFPSEQARA

SEQ ID NO: 16432 - protein, 9 aa, Artificial Sequence
  Description of Artificial Sequence: Synthetic peptide
SEVGFPVRP

SEQ ID NO: 16433 - protein, 9 aa, Artificial Sequence
  Description of Artificial Sequence: Synthetic peptide
AEWDRIHPP

SEQ ID NO: 16434 - protein, 10 aa, Artificial Sequence
  Description of Artificial Sequence: Synthetic peptide
REFPSEQARA

SEQ ID NO: 16435 - protein, 10 aa, Artificial Sequence
  Description of Artificial Sequence: Synthetic peptide
GEVIGDIRKA

SEQ ID NO: 16436 - protein, 9 aa, Artificial Sequence
  Description of Artificial Sequence: Synthetic peptide
SETETFRPA

SEQ ID NO: 16437 - protein, 9 aa, Artificial Sequence
  Description of Artificial Sequence: Synthetic peptide
NETVPITCA

SEQ ID NO: 16438 - protein, 10 aa, Artificial Sequence
  Description of Artificial Sequence: Synthetic peptide
REFSPEQARA

SEQ ID NO: 16439 - protein, 9 aa, Artificial Sequence
  Description of Artificial Sequence: Synthetic peptide
LETEPIPGA

SEQ ID NO: 16440 - protein, 9 aa, Artificial Sequence
  Description of Artificial Sequence: Synthetic peptide
LETEPIIGA

SEQ ID NO: 16441 - protein, 10 aa, Artificial Sequence
  Description of Artificial Sequence: Synthetic peptide
REFSSEQARA

SEQ ID NO: 16442 - protein, 8 aa, Artificial Sequence
  Description of Artificial Sequence: Synthetic peptide
SETETFRP

SEQ ID NO: 16443 - protein, 9 aa, Artificial Sequence
  Description of Artificial Sequence: Synthetic peptide
KEFNGTGLC

SEQ ID NO: 16444 - protein, 9 aa, Artificial Sequence
  Description of Artificial Sequence: Synthetic peptide
KEFNGTGPC

SEQ ID NO: 16445 - protein, 11 aa, Artificial Sequence
  Description of Artificial Sequence: Synthetic peptide
AEWDRLHPQQA

SEQ ID NO: 16446 - protein, 8 aa, Artificial Sequence
  Description of Artificial Sequence: Synthetic peptide
REFPSEQA

SEQ ID NO: 16447 - protein, 9 aa, Artificial Sequence
  Description of Artificial Sequence: Synthetic peptide
KEYNGTGPC

SEQ ID NO: 16448 - protein, 11 aa, Artificial Sequence
  Description of Artificial Sequence: Synthetic peptide
AEWDRIHPQQA

SEQ ID NO: 16449 - protein, 9 aa, Artificial Sequence
  Description of Artificial Sequence: Synthetic peptide
IEVKDTKEA

SEQ ID NO: 16450 - protein, 9 aa, Artificial Sequence
  Description of Artificial Sequence: Synthetic peptide
QEFGIPYNP

SEQ ID NO: 16451 - protein, 9 aa, Artificial Sequence
  Description of Artificial Sequence: Synthetic peptide
AETYYVDGA

SEQ ID NO: 16452 - protein, 10 aa, Artificial Sequence
  Description of Artificial Sequence: Synthetic peptide
KEKEFNGTGP

SEQ ID NO: 16453 - protein, 8 aa, Artificial Sequence
  Description of Artificial Sequence: Synthetic peptide
RDFILIAA

SEQ ID NO: 16454 - protein, 9 aa, Artificial Sequence
  Description of Artificial Sequence: Synthetic peptide
REMLKNVTA

SEQ ID NO: 16455 - protein, 8 aa, Artificial Sequence
  Description of Artificial Sequence: Synthetic peptide
KEFNGTGP

SEQ ID NO: 16456 - protein, 10 aa, Artificial Sequence
  Description of Artificial Sequence: Synthetic peptide
SDFNLPPVVA

SEQ ID NO: 16457 - protein, 9 aa, Artificial Sequence
  Description of Artificial Sequence: Synthetic peptide
GENNSLLHP

SEQ ID NO: 16458 - protein, 9 aa, Artificial Sequence
  Description of Artificial Sequence: Synthetic peptide
AELHAIQLA

SEQ ID NO: 16459 - protein, 9 aa, Artificial Sequence
  Description of Artificial Sequence: Synthetic peptide
EEIAPSPKP

SEQ ID NO: 16460 - protein, 8 aa, Artificial Sequence
  Description of Artificial Sequence: Synthetic peptide
NETEIFRP

SEQ ID NO: 16461 - protein, 8 aa, Artificial Sequence
  Description of Artificial Sequence: Synthetic peptide
SESAIRKA

SEQ ID NO: 16462 - protein, 9 aa, Artificial Sequence
  Description of Artificial Sequence: Synthetic peptide
AELQAIQLA

SEQ ID NO: 16463 - protein, 9 aa, Artificial Sequence
  Description of Artificial Sequence: Synthetic peptide
NETEIFRPV

SEQ ID NO: 16464 - protein, 9 aa, Artificial Sequence
  Description of Artificial Sequence: Synthetic peptide
SENNDTITL

SEQ ID NO: 16465 - protein, 8 aa, Artificial Sequence
  Description of Artificial Sequence: Synthetic peptide
SDIQTKEL

SEQ ID NO: 16466 - protein, 9 aa, Artificial Sequence
  Description of Artificial Sequence: Synthetic peptide
SESAIRNAI

SEQ ID NO: 16467 - protein, 9 aa, Artificial Sequence
  Description of Artificial Sequence: Synthetic peptide
SERVLSTCL

SEQ ID NO: 16468 - protein, 8 aa, Artificial Sequence
  Description of Artificial Sequence: Synthetic peptide
AEVQKQGL

SEQ ID NO: 16469 - protein, 8 aa, Artificial Sequence
  Description of Artificial Sequence: Synthetic peptide
AELQAIQL

SEQ ID NO: 16470 - protein, 9 aa, Artificial Sequence
  Description of Artificial Sequence: Synthetic peptide
SERILSTCL

SEQ ID NO: 16471 - protein, 9 aa, Artificial Sequence
  Description of Artificial Sequence: Synthetic peptide
VELLGRNSL

SEQ ID NO: 16472 - protein, 8 aa, Artificial Sequence
  Description of Artificial Sequence: Synthetic peptide
AEHLKTAV

SEQ ID NO: 16473 - protein, 8 aa, Artificial Sequence
  Description of Artificial Sequence: Synthetic peptide
IEKVKAQL

SEQ ID NO: 16474 - protein, 9 aa, Artificial Sequence
  Description of Artificial Sequence: Synthetic peptide
MEDEDREVL

SEQ ID NO: 16475 - protein, 9 aa, Artificial Sequence
  Description of Artificial Sequence: Synthetic peptide
VELLGRSSL

SEQ ID NO: 16476 - protein, 9 aa, Artificial Sequence
  Description of Artificial Sequence: Synthetic peptide
SERILSSCL

SEQ ID NO: 16477 - protein, 8 aa, Artificial Sequence
  Description of Artificial Sequence: Synthetic peptide
KEFNGTGL

SEQ ID NO: 16478 - protein, 9 aa, Artificial Sequence
  Description of Artificial Sequence: Synthetic peptide
SESAIRKAI

SEQ ID NO: 16479 - protein, 8 aa, Artificial Sequence
  Description of Artificial Sequence: Synthetic peptide
AELHAIQL

SEQ ID NO: 16480 - protein, 9 aa, Artificial Sequence
  Description of Artificial Sequence: Synthetic peptide
VELLGHNSL

SEQ ID NO: 16481 - protein, 9 aa, Artificial Sequence
  Description of Artificial Sequence: Synthetic peptide
SDSAIRKAL

SEQ ID NO: 16482 - protein, 9 aa, Artificial Sequence
  Description of Artificial Sequence: Synthetic peptide
AEGKGDTSL

SEQ ID NO: 16483 - protein, 10 aa, Artificial Sequence
  Description of Artificial Sequence: Synthetic peptide
SESAIRNAIL

SEQ ID NO: 16484 - protein, 10 aa, Artificial Sequence
  Description of Artificial Sequence: Synthetic peptide
TETTNQKTEL

SEQ ID NO: 16485 - protein, 8 aa, Artificial Sequence
  Description of Artificial Sequence: Synthetic peptide
TELQAIQL

SEQ ID NO: 16486 - protein, 8 aa, Artificial Sequence
  Description of Artificial Sequence: Synthetic peptide
IEAQQHLL

SEQ ID NO: 16487 - protein, 9 aa, Artificial Sequence
  Description of Artificial Sequence: Synthetic peptide
QEKNEQDLL

SEQ ID NO: 16488 - protein, 8 aa, Artificial Sequence
  Description of Artificial Sequence: Synthetic peptide
REMERFAL

SEQ ID NO: 16489 - protein, 9 aa, Artificial Sequence
  Description of Artificial Sequence: Synthetic peptide
KEKGGLEGL

SEQ ID NO: 16490 - protein, 8 aa, Artificial Sequence
  Description of Artificial Sequence: Synthetic peptide
AEKLWVTV

SEQ ID NO: 16491 - protein, 9 aa, Artificial Sequence
  Description of Artificial Sequence: Synthetic peptide
GEQDRDRSI

SEQ ID NO: 16492 - protein, 9 aa, Artificial Sequence
  Description of Artificial Sequence: Synthetic peptide
IEIGGKKAI

SEQ ID NO: 16493 - protein, 9 aa, Artificial Sequence
  Description of Artificial Sequence: Synthetic peptide
GEQDRDKSI

SEQ ID NO: 16494 - protein, 10 aa, Artificial Sequence
  Description of Artificial Sequence: Synthetic peptide
TETTNQKAEL

SEQ ID NO: 16495 - protein, 9 aa, Artificial Sequence
  Description of Artificial Sequence: Synthetic peptide
SERILSACL

SEQ ID NO: 16496 - protein, 10 aa, Artificial Sequence
  Description of Artificial Sequence: Synthetic peptide
AEHLKTAVQM

SEQ ID NO: 16497 - protein, 9 aa, Artificial Sequence
  Description of Artificial Sequence: Synthetic peptide
KEIHPLASL

SEQ ID NO: 16498 - protein, 8 aa, Artificial Sequence
  Description of Artificial Sequence: Synthetic peptide
TERQANFL

SEQ ID NO: 16499 - protein, 9 aa, Artificial Sequence
  Description of Artificial Sequence: Synthetic peptide
KELYPLTSL

SEQ ID NO: 16500 - protein, 9 aa, Artificial Sequence
  Description of Artificial Sequence: Synthetic peptide
IEISGKKAI

SEQ ID NO: 16501 - protein, 9 aa, Artificial Sequence
  Description of Artificial Sequence: Synthetic peptide
TEMEREGKI

SEQ ID NO: 16502 - protein, 9 aa, Artificial Sequence
  Description of Artificial Sequence: Synthetic peptide
REMLKNVTA

SEQ ID NO: 16503 - protein, 9 aa, Artificial Sequence
  Description of Artificial Sequence: Synthetic peptide
MEDADKEVL

SEQ ID NO: 16504 - protein, 9 aa, Artificial Sequence
  Description of Artificial Sequence: Synthetic peptide
KEKGGLDGL

SEQ ID NO: 16505 - protein, 9 aa, Artificial Sequence
  Description of Artificial Sequence: Synthetic peptide
AEGQGVIPL

SEQ ID NO: 16506 - protein, 9 aa, Artificial Sequence
  Description of Artificial Sequence: Synthetic peptide
KELYPLSSL

SEQ ID NO: 16507 - protein, 9 aa, Artificial Sequence
  Description of Artificial Sequence: Synthetic peptide
AEKDIIISS

SEQ ID NO: 16508 - protein, 9 aa, Artificial Sequence
  Description of Artificial Sequence: Synthetic peptide
ANSPTRREL

SEQ ID NO: 16509 - protein, 9 aa, Artificial Sequence
  Description of Artificial Sequence: Synthetic peptide
GEQDKDRSI

SEQ ID NO: 16510 - protein, 8 aa, Artificial Sequence
  Description of Artificial Sequence: Synthetic peptide
IEIVQRAF

SEQ ID NO: 16511 - protein, 11 aa, Artificial Sequence
  Description of Artificial Sequence: Synthetic peptide
AEQATQEVKSW

SEQ ID NO: 16512 - protein, 11 aa, Artificial Sequence
  Description of Artificial Sequence: Synthetic peptide
AEQATQEVKGW

SEQ ID NO: 16513 - protein, 10 aa, Artificial Sequence
  Description of Artificial Sequence: Synthetic peptide
NENNGTNSTW

SEQ ID NO: 16514 - protein, 11 aa, Artificial Sequence
  Description of Artificial Sequence: Synthetic peptide
SEVNIVTDSQY

SEQ ID NO: 16515 - protein, 9 aa, Artificial Sequence
  Description of Artificial Sequence: Synthetic peptide
EEIDLPGKW

SEQ ID NO: 16516 - protein, 9 aa, Artificial Sequence
  Description of Artificial Sequence: Synthetic peptide
SESAIRNAI

SEQ ID NO: 16517 - protein, 9 aa, Artificial Sequence
  Description of Artificial Sequence: Synthetic peptide
SESAIRKAI

SEQ ID NO: 16518 - protein, 11 aa, Artificial Sequence
  Description of Artificial Sequence: Synthetic peptide
NEQDLLALDKW

SEQ ID NO: 16519 - protein, 11 aa, Artificial Sequence
  Description of Artificial Sequence: Synthetic peptide
NEQDLLALDQW

SEQ ID NO: 16520 - protein, 9 aa, Artificial Sequence
  Description of Artificial Sequence: Synthetic peptide
SENNDTITL

SEQ ID NO: 16521 - protein, 9 aa, Artificial Sequence
  Description of Artificial Sequence: Synthetic peptide
SESEIVNQI

SEQ ID NO: 16522 - protein, 11 aa, Artificial Sequence
  Description of Artificial Sequence: Synthetic peptide
AEMELAENREI

SEQ ID NO: 16523 - protein, 10 aa, Artificial Sequence
  Description of Artificial Sequence: Synthetic peptide
NETPGIRYQY

SEQ ID NO: 16524 - protein, 10 aa, Artificial Sequence
  Description of Artificial Sequence: Synthetic peptide
TEPIIGAETY

SEQ ID NO: 16525 - protein, 9 aa, Artificial Sequence
  Description of Artificial Sequence: Synthetic peptide
AETGQETAY

SEQ ID NO: 16526 - protein, 9 aa, Artificial Sequence
  Description of Artificial Sequence: Synthetic peptide
GEGAISLNF

SEQ ID NO: 16527 - protein, 11 aa, Artificial Sequence
  Description of Artificial Sequence: Synthetic peptide
NEQDLLALDNW

SEQ ID NO: 16528 - protein, 11 aa, Artificial Sequence
  Description of Artificial Sequence: Synthetic peptide
SEVNIVTDSQY

SEQ ID NO: 16529 - protein, 11 aa, Artificial Sequence
  Description of Artificial Sequence: Synthetic peptide
AEQATQEVKSW

SEQ ID NO: 16530 - protein, 11 aa, Artificial Sequence
  Description of Artificial Sequence: Synthetic peptide
AEQATQEVKGW

SEQ ID NO: 16531 - protein, 9 aa, Artificial Sequence
  Description of Artificial Sequence: Synthetic peptide
EEIDLPGKW

SEQ ID NO: 16532 - protein, 10 aa, Artificial Sequence
  Description of Artificial Sequence: Synthetic peptide
NENNGTNSTW

SEQ ID NO: 16533 - protein, 9 aa, Artificial Sequence
  Description of Artificial Sequence: Synthetic peptide
SESAIRKAI

SEQ ID NO: 16534 - protein, 9 aa, Artificial Sequence
  Description of Artificial Sequence: Synthetic peptide
SESEIVNQI

SEQ ID NO: 16535 - protein, 9 aa, Artificial Sequence
  Description of Artificial Sequence: Synthetic peptide
SESAIRNAI

SEQ ID NO: 16536 - protein, 11 aa, Artificial Sequence
  Description of Artificial Sequence: Synthetic peptide
AEVQKQGLGQW

SEQ ID NO: 16537 - protein, 11 aa, Artificial Sequence
  Description of Artificial Sequence: Synthetic peptide
AEVQKQGPDQW

SEQ ID NO: 16538 - protein, 9 aa, Artificial Sequence
  Description of Artificial Sequence: Synthetic peptide
SENNDTITL

SEQ ID NO: 16539 - protein, 10 aa, Artificial Sequence
  Description of Artificial Sequence: Synthetic peptide
NETPGIRYQY

SEQ ID NO: 16540 - protein, 11 aa, Artificial Sequence
  Description of Artificial Sequence: Synthetic peptide
AEVQKQEQGQW

SEQ ID NO: 16541 - protein, 9 aa, Artificial Sequence
  Description of Artificial Sequence: Synthetic peptide
GEGAISLNF

SEQ ID NO: 16542 - protein, 10 aa, Artificial Sequence
  Description of Artificial Sequence: Synthetic peptide
TEPIIGAETY

SEQ ID NO: 16543 - protein, 11 aa, Artificial Sequence
  Description of Artificial Sequence: Synthetic peptide
NEQDLLALDKW

SEQ ID NO: 16544 - protein, 11 aa, Artificial Sequence
  Description of Artificial Sequence: Synthetic peptide
AEVQKQGPGQW

SEQ ID NO: 16545 - protein, 9 aa, Artificial Sequence
  Description of Artificial Sequence: Synthetic peptide
SESELVNQI

SEQ ID NO: 16546 - protein, 11 aa, Artificial Sequence
  Description of Artificial Sequence: Synthetic peptide
NEQDLLALDQW

SEQ ID NO: 16547 - protein, 9 aa, Artificial Sequence
  Description of Artificial Sequence: Synthetic peptide
AETGQETAY

SEQ ID NO: 16548 - protein, 9 aa, Artificial Sequence
  Description of Artificial Sequence: Synthetic peptide
NEIWENMTW

SEQ ID NO: 16549 - protein, 11 aa, Artificial Sequence
  Description of Artificial Sequence: Synthetic peptide
AEMELAENREI

SEQ ID NO: 16550 - protein, 11 aa, Artificial Sequence
  Description of Artificial Sequence: Synthetic peptide
TEIGVGSPQIF

SEQ ID NO: 16551 - protein, 11 aa, Artificial Sequence
  Description of Artificial Sequence: Synthetic peptide
QEYFINKSIEF

SEQ ID NO: 16552 - protein, 9 aa, Artificial Sequence
  Description of Artificial Sequence: Synthetic peptide
NEIWDNMTW

SEQ ID NO: 16553 - protein, 9 aa, Artificial Sequence
  Description of Artificial Sequence: Synthetic peptide
QEQKEKELY

SEQ ID NO: 16554 - protein, 10 aa, Artificial Sequence
  Description of Artificial Sequence: Synthetic peptide
TEIGVGSPQI

SEQ ID NO: 16555 - protein, 9 aa, Artificial Sequence
  Description of Artificial Sequence: Synthetic peptide
TEMEREGKI

SEQ ID NO: 16556 - protein, 10 aa, Artificial Sequence
  Description of Artificial Sequence: Synthetic peptide
AETGQETAYF

SEQ ID NO: 16557 - protein, 11 aa, Artificial Sequence
  Description of Artificial Sequence: Synthetic peptide
AEGKGDTSLSF

SEQ ID NO: 16558 - protein, 11 aa, Artificial Sequence
  Description of Artificial Sequence: Synthetic peptide
NEQDLLALDNW

SEQ ID NO: 16559 - protein, 8 aa, Artificial Sequence
  Description of Artificial Sequence: Synthetic peptide
NETPGIRY

SEQ ID NO: 16560 - protein, 11 aa, Artificial Sequence
  Description of Artificial Sequence: Synthetic peptide
TEPIPGVETYY

SEQ ID NO: 16561 - protein, 11 aa, Artificial Sequence
  Description of Artificial Sequence: Synthetic peptide
TEPIIGAETYY

SEQ ID NO: 16562 - protein, 10 aa, Artificial Sequence
  Description of Artificial Sequence: Synthetic peptide
TEPIPGVETY

SEQ ID NO: 16563 - protein, 9 aa, Artificial Sequence
  Description of Artificial Sequence: Synthetic peptide
SENNDTITL

SEQ ID NO: 16564 - protein, 11 aa, Artificial Sequence
  Description of Artificial Sequence: Synthetic peptide
AEQATQEVKSW

SEQ ID NO: 16565 - protein, 11 aa, Artificial Sequence
  Description of Artificial Sequence: Synthetic peptide
AEQATQEVKGW

SEQ ID NO: 16566 - protein, 10 aa, Artificial Sequence
  Description of Artificial Sequence: Synthetic peptide
NENNGTNSTW

SEQ ID NO: 16567 - protein, 9 aa, Artificial Sequence
  Description of Artificial Sequence: Synthetic peptide
SESAIRNAI

SEQ ID NO: 16568 - protein, 11 aa, Artificial Sequence
  Description of Artificial Sequence: Synthetic peptide
AEMELAENREI

SEQ ID NO: 16569 - protein, 11 aa, Artificial Sequence
  Description of Artificial Sequence: Synthetic peptide
SEVNIVTDSQY

SEQ ID NO: 16570 - protein, 10 aa, Artificial Sequence
  Description of Artificial Sequence: Synthetic peptide
AETGQETAYF

SEQ ID NO: 16571 - protein, 10 aa, Artificial Sequence
  Description of Artificial Sequence: Synthetic peptide
TETTNQKTEL

SEQ ID NO: 16572 - protein, 10 aa, Artificial Sequence
  Description of Artificial Sequence: Synthetic peptide
TETTNQKAEL

SEQ ID NO: 16573 - protein, 9 aa, Artificial Sequence
  Description of Artificial Sequence: Synthetic peptide
QEEDSEVGF

SEQ ID NO: 16574 - protein, 9 aa, Artificial Sequence
  Description of Artificial Sequence: Synthetic peptide
EEIDLPGKW

SEQ ID NO: 16575 - protein, 9 aa, Artificial Sequence
  Description of Artificial Sequence: Synthetic peptide
SESEIVNQI

SEQ ID NO: 16576 - protein, 11 aa, Artificial Sequence
  Description of Artificial Sequence: Synthetic peptide
TEIGVGSPQIF

SEQ ID NO: 16577 - protein, 11 aa, Artificial Sequence
  Description of Artificial Sequence: Synthetic peptide
SEIVNQIIEQL

SEQ ID NO: 16578 - protein, 11 aa, Artificial Sequence
  Description of Artificial Sequence: Synthetic peptide
TEINNNSTRNI

SEQ ID NO: 16579 - protein, 11 aa, Artificial Sequence
  Description of Artificial Sequence: Synthetic peptide
AEGKGDTSLSF

SEQ ID NO: 16580 - protein, 10 aa, Artificial Sequence
  Description of Artificial Sequence: Synthetic peptide
TEIGVGSPQI

SEQ ID NO: 16581 - protein, 9 aa, Artificial Sequence
  Description of Artificial Sequence: Synthetic peptide
AEGKGDTSL

SEQ ID NO: 16582 - protein, 10 aa, Artificial Sequence
  Description of Artificial Sequence: Synthetic peptide
TETGVGGPQI

SEQ ID NO: 16583 - protein, 11 aa, Artificial Sequence
  Description of Artificial Sequence: Synthetic peptide
AEVQKQEQGQW

SEQ ID NO: 16584 - protein, 11 aa, Artificial Sequence
  Description of Artificial Sequence: Synthetic peptide
AEVQKQGPDQW

SEQ ID NO: 16585 - protein, 11 aa, Artificial Sequence
  Description of Artificial Sequence: Synthetic peptide
AELELAENREI

SEQ ID NO: 16586 - protein, 9 aa, Artificial Sequence
  Description of Artificial Sequence: Synthetic peptide
QEEDSDVGF

SEQ ID NO: 16587 - protein, 8 aa, Artificial Sequence
  Description of Artificial Sequence: Synthetic peptide
AELQAIQL

SEQ ID NO: 16588 - protein, 10 aa, Artificial Sequence
  Description of Artificial Sequence: Synthetic peptide
AEHLKTAVQM

SEQ ID NO: 16589 - protein, 9 aa, Artificial Sequence
  Description of Artificial Sequence: Synthetic peptide
SESELVNQI

SEQ ID NO: 16590 - protein, 10 aa, Artificial Sequence
  Description of Artificial Sequence: Synthetic peptide
SESAIRNAIL

SEQ ID NO: 16591 - protein, 10 aa, Artificial Sequence
  Description of Artificial Sequence: Synthetic peptide
AEGKGTISSI

SEQ ID NO: 16592 - protein, 10 aa, Artificial Sequence
  Description of Artificial Sequence: Synthetic peptide
REISNYTQQI

SEQ ID NO: 16593 - protein, 10 aa, Artificial Sequence
  Description of Artificial Sequence: Synthetic peptide
AELQAIQLAL

SEQ ID NO: 16594 - protein, 9 aa, Artificial Sequence
  Description of Artificial Sequence: Synthetic peptide
SESAIRKAI

SEQ ID NO: 16595 - protein, 10 aa, Artificial Sequence
  Description of Artificial Sequence: Synthetic peptide
GEIIIKSENI

SEQ ID NO: 16596 - protein, 10 aa, Artificial Sequence
  Description of Artificial Sequence: Synthetic peptide
KEAPEEVEKI

SEQ ID NO: 16597 - protein, 11 aa, Artificial Sequence
  Description of Artificial Sequence: Synthetic peptide
TEPTAPPAESF

SEQ ID NO: 16598 - protein, 9 aa, Artificial Sequence
  Description of Artificial Sequence: Synthetic peptide
TEMEREGKI

SEQ ID NO: 16599 - protein, 8 aa, Artificial Sequence
  Description of Artificial Sequence: Synthetic peptide
AELHAIQL

SEQ ID NO: 16600 - protein, 9 aa, Artificial Sequence
  Description of Artificial Sequence: Synthetic peptide
NESVSAQEI

SEQ ID NO: 16601 - protein, 9 aa, Artificial Sequence
  Description of Artificial Sequence: Synthetic peptide
VELLGHNSL

SEQ ID NO: 16602 - protein, 11 aa, Artificial Sequence
  Description of Artificial Sequence: Synthetic peptide
AEVQKQGPGQW

SEQ ID NO: 16603 - protein, 9 aa, Artificial Sequence
  Description of Artificial Sequence: Synthetic peptide
SEGATPQDL

SEQ ID NO: 16604 - protein, 9 aa, Artificial Sequence
  Description of Artificial Sequence: Synthetic peptide
EELLTAVRI

SEQ ID NO: 16605 - protein, 9 aa, Artificial Sequence
  Description of Artificial Sequence: Synthetic peptide
NEMEKEGKI

SEQ ID NO: 16606 - protein, 9 aa, Artificial Sequence
  Description of Artificial Sequence: Synthetic peptide
GEGAISLNF

SEQ ID NO: 16607 - protein, 11 aa, Artificial Sequence
  Description of Artificial Sequence: Synthetic peptide
SELVNQIIEQL

SEQ ID NO: 16608 - protein, 10 aa, Artificial Sequence
  Description of Artificial Sequence: Synthetic peptide
SESEIVNQII

SEQ ID NO: 16609 - protein, 11 aa, Artificial Sequence
  Description of Artificial Sequence: Synthetic peptide
AEGKGTISSIF

SEQ ID NO: 16610 - protein, 9 aa, Artificial Sequence
  Description of Artificial Sequence: Synthetic peptide
QEKNEQDLL

SEQ ID NO: 16611 - protein, 10 aa, Artificial Sequence
  Description of Artificial Sequence: Synthetic peptide
AELHAIQLAL

SEQ ID NO: 16612 - protein, 10 aa, Artificial Sequence
  Description of Artificial Sequence: Synthetic peptide
GEIMIRSENI

SEQ ID NO: 16613 - protein, 9 aa, Artificial Sequence
  Description of Artificial Sequence: Synthetic peptide
GEQDKDRSI

SEQ ID NO: 16614 - protein, 11 aa, Artificial Sequence
  Description of Artificial Sequence: Synthetic peptide
TETGVGGPQIF

SEQ ID NO: 16615 - protein, 9 aa, Artificial Sequence
  Description of Artificial Sequence: Synthetic peptide
AEGQGVIPL

SEQ ID NO: 16616 - protein, 10 aa, Artificial Sequence
  Description of Artificial Sequence: Synthetic peptide
TEPGLGGPQI

SEQ ID NO: 16617 - protein, 10 aa, Artificial Sequence
  Description of Artificial Sequence: Synthetic peptide
EEIKSLFNTV

SEQ ID NO: 16618 - protein, 11 aa, Artificial Sequence
  Description of Artificial Sequence: Synthetic peptide
AEGVGAVSQDL

SEQ ID NO: 16619 - protein, 9 aa, Artificial Sequence
  Description of Artificial Sequence: Synthetic peptide
SERVLSTCL

SEQ ID NO: 16620 - protein, 11 aa, Artificial Sequence
  Description of Artificial Sequence: Synthetic peptide
AEVQKQGLGQW

SEQ ID NO: 16621 - protein, 9 aa, Artificial Sequence
  Description of Artificial Sequence: Synthetic peptide
KEIHPLASL

SEQ ID NO: 16622 - protein, 11 aa, Artificial Sequence
  Description of Artificial Sequence: Synthetic peptide
SEGDTEELATL

SEQ ID NO: 16623 - protein, 11 aa, Artificial Sequence
  Description of Artificial Sequence: Synthetic peptide
NEQDLLALDQW

SEQ ID NO: 16624 - protein, 9 aa, Artificial Sequence
  Description of Artificial Sequence: Synthetic peptide
TDVVPINEM

SEQ ID NO: 16625 - protein, 8 aa, Artificial Sequence
  Description of Artificial Sequence: Synthetic peptide
TELQAIQL

SEQ ID NO: 16626 - protein, 11 aa, Artificial Sequence
  Description of Artificial Sequence: Synthetic peptide
KETINDEAAEW

SEQ ID NO: 16627 - protein, 9 aa, Artificial Sequence
  Description of Artificial Sequence: Synthetic peptide
EELATLMEL

SEQ ID NO: 16628 - protein, 8 aa, Artificial Sequence
  Description of Artificial Sequence: Synthetic peptide
EEIKNCSF

SEQ ID NO: 16629 - protein, 9 aa, Artificial Sequence
  Description of Artificial Sequence: Synthetic peptide
GEQDRDRSI

SEQ ID NO: 16630 - protein, 9 aa, Artificial Sequence
  Description of Artificial Sequence: Synthetic peptide
VELLGRNSL

SEQ ID NO: 16631 - protein, 9 aa, Artificial Sequence
  Description of Artificial Sequence: Synthetic peptide
QLTEVVQKI

SEQ ID NO: 16632 - protein, 8 aa, Artificial Sequence
  Description of Artificial Sequence: Synthetic peptide
SDIQTKEL

SEQ ID NO: 16633 - protein, 9 aa, Artificial Sequence
  Description of Artificial Sequence: Synthetic peptide
GEQDRDKSI

SEQ ID NO: 16634 - protein, 9 aa, Artificial Sequence
  Description of Artificial Sequence: Synthetic peptide
VAIGPGQAF

SEQ ID NO: 16635 - protein, 9 aa, Artificial Sequence
  Description of Artificial Sequence: Synthetic peptide
STRNITEEY

SEQ ID NO: 16636 - protein, 9 aa, Artificial Sequence
  Description of Artificial Sequence: Synthetic peptide
ISNGNKTSY

SEQ ID NO: 16637 - protein, 9 aa, Artificial Sequence
  Description of Artificial Sequence: Synthetic peptide
IPIGPGQAF

SEQ ID NO: 16638 - protein, 9 aa, Artificial Sequence
  Description of Artificial Sequence: Synthetic peptide
RAVGVGAVF

SEQ ID NO: 16639 - protein, 10 aa, Artificial Sequence
  Description of Artificial Sequence: Synthetic peptide
ILKEPVHGVY

SEQ ID NO: 16640 - protein, 10 aa, Artificial Sequence
  Description of Artificial Sequence: Synthetic peptide
VAIGPGQAFY

SEQ ID NO: 16641 - protein, 9 aa, Artificial Sequence
  Description of Artificial Sequence: Synthetic peptide
SALFNSSSL

SEQ ID NO: 16642 - protein, 10 aa, Artificial Sequence
  Description of Artificial Sequence: Synthetic peptide
SIRFGPGQAF

SEQ ID NO: 16643 - protein, 9 aa, Artificial Sequence
  Description of Artificial Sequence: Synthetic peptide
STVGSTAGY

SEQ ID NO: 16644 - protein, 9 aa, Artificial Sequence
  Description of Artificial Sequence: Synthetic peptide
KAKPPLPSV

SEQ ID NO: 16645 - protein, 9 aa, Artificial Sequence
  Description of Artificial Sequence: Synthetic peptide
FLGTAGSTM

SEQ ID NO: 16646 - protein, 8 aa, Artificial Sequence
  Description of Artificial Sequence: Synthetic peptide
HLGPGQAL

SEQ ID NO: 16647 - protein, 9 aa, Artificial Sequence
  Description of Artificial Sequence: Synthetic peptide
GKKAIGTVL

SEQ ID NO: 16648 - protein, 8 aa, Artificial Sequence
  Description of Artificial Sequence: Synthetic peptide
HQAAMQML

SEQ ID NO: 16649 - protein, 8 aa, Artificial Sequence
  Description of Artificial Sequence: Synthetic peptide
GKQKIITL

SEQ ID NO: 16650 - protein, 9 aa, Artificial Sequence
  Description of Artificial Sequence: Synthetic peptide
HQAISPRTL

SEQ ID NO: 16651 - protein, 9 aa, Artificial Sequence
  Description of Artificial Sequence: Synthetic peptide
IKPVVSTQL

SEQ ID NO: 16652 - protein, 8 aa, Artificial Sequence
  Description of Artificial Sequence: Synthetic peptide
KQLQSRVL

SEQ ID NO: 16653 - protein, 8 aa, Artificial Sequence
  Description of Artificial Sequence: Synthetic peptide
AKNIIVQL

SEQ ID NO: 16654 - protein, 9 aa, Artificial Sequence
  Description of Artificial Sequence: Synthetic peptide
RAIEAQQHL

SEQ ID NO: 16655 - protein, 9 aa, Artificial Sequence
  Description of Artificial Sequence: Synthetic peptide
KALTDIVSM

SEQ ID NO: 16656 - protein, 8 aa, Artificial Sequence
  Description of Artificial Sequence: Synthetic peptide
AKVIIVHL

SEQ ID NO: 16657 - protein, 9 aa, Artificial Sequence
  Description of Artificial Sequence: Synthetic peptide
RALGPGASL

SEQ ID NO: 16658 - protein, 11 aa, Artificial Sequence
  Description of Artificial Sequence: Synthetic peptide
TQIDPDLADQL

SEQ ID NO: 16659 - protein, 9 aa, Artificial Sequence
  Description of Artificial Sequence: Synthetic peptide
IMAQLQPAL

SEQ ID NO: 16660 - protein, 8 aa, Artificial Sequence
  Description of Artificial Sequence: Synthetic peptide
KQLQARVL

SEQ ID NO: 16661 - protein, 9 aa, Artificial Sequence
  Description of Artificial Sequence: Synthetic peptide
RALGPGATL

SEQ ID NO: 16662 - protein, 9 aa, Artificial Sequence
  Description of Artificial Sequence: Synthetic peptide
RAVGLGAVL

SEQ ID NO: 16663 - protein, 9 aa, Artificial Sequence
  Description of Artificial Sequence: Synthetic peptide
SALFNSSSL

SEQ ID NO: 16664 - protein, 8 aa, Artificial Sequence
  Description of Artificial Sequence: Synthetic peptide
KKAIGTVL

SEQ ID NO: 16665 - protein, 10 aa, Artificial Sequence
  Description of Artificial Sequence: Synthetic peptide
TEIGVGSPQI

SEQ ID NO: 16666 - protein, 9 aa, Artificial Sequence
  Description of Artificial Sequence: Synthetic peptide
SESEIVNQI

SEQ ID NO: 16667 - protein, 9 aa, Artificial Sequence
  Description of Artificial Sequence: Synthetic peptide
SESELVNQI

SEQ ID NO: 16668 - protein, 9 aa, Artificial Sequence
  Description of Artificial Sequence: Synthetic peptide
SESAIRNAI

SEQ ID NO: 16669 - protein, 10 aa, Artificial Sequence
  Description of Artificial Sequence: Synthetic peptide
CEYPAGHNKV

SEQ ID NO: 16670 - protein, 10 aa, Artificial Sequence
  Description of Artificial Sequence: Synthetic peptide
EEIKSLFNTV

SEQ ID NO: 16671 - protein, 9 aa, Artificial Sequence
  Description of Artificial Sequence: Synthetic peptide
LETEPIPGV

SEQ ID NO: 16672 - protein, 9 aa, Artificial Sequence
  Description of Artificial Sequence: Synthetic peptide
NETVEITCV

SEQ ID NO: 16673 - protein, 9 aa, Artificial Sequence
  Description of Artificial Sequence: Synthetic peptide
QEYFINKSI

SEQ ID NO: 16674 - protein, 9 aa, Artificial Sequence
  Description of Artificial Sequence: Synthetic peptide
IEIGGKKAI

SEQ ID NO: 16675 - protein, 10 aa, Artificial Sequence
  Description of Artificial Sequence: Synthetic peptide
TETGVGGPQI

SEQ ID NO: 16676 - protein, 9 aa, Artificial Sequence
  Description of Artificial Sequence: Synthetic peptide
TEMEREGKI

SEQ ID NO: 16677 - protein, 10 aa, Artificial Sequence
  Description of Artificial Sequence: Synthetic peptide
REISNYTQQI

SEQ ID NO: 16678 - protein, 10 aa, Artificial Sequence
  Description of Artificial Sequence: Synthetic peptide
TETGVGRPQV

SEQ ID NO: 16679 - protein, 9 aa, Artificial Sequence
  Description of Artificial Sequence: Synthetic peptide
IEISGKKAI

SEQ ID NO: 16680 - protein, 9 aa, Artificial Sequence
  Description of Artificial Sequence: Synthetic peptide
LEITTHSFI

SEQ ID NO: 16681 - protein, 10 aa, Artificial Sequence
  Description of Artificial Sequence: Synthetic peptide
CEYQAGHNKV

SEQ ID NO: 16682 - protein, 9 aa, Artificial Sequence
  Description of Artificial Sequence: Synthetic peptide
SENNDTITL

SEQ ID NO: 16683 - protein, 9 aa, Artificial Sequence
  Description of Artificial Sequence: Synthetic peptide
KEFNGTGLC

SEQ ID NO: 16684 - protein, 10 aa, Artificial Sequence
  Description of Artificial Sequence: Synthetic peptide
CEYQAGHTKV

SEQ ID NO: 16685 - protein, 9 aa, Artificial Sequence
  Description of Artificial Sequence: Synthetic peptide
NESVSAQEI

SEQ ID NO: 16686 - protein, 8 aa, Artificial Sequence
  Description of Artificial Sequence: Synthetic peptide
FESMHPKV

SEQ ID NO: 16687 - protein, 10 aa, Artificial Sequence
  Description of Artificial Sequence: Synthetic peptide
AENFGFGEEI

SEQ ID NO: 16688 - protein, 11 aa, Artificial Sequence
  Description of Artificial Sequence: Synthetic peptide
TEINNNSTRNI

SEQ ID NO: 16689 - protein, 8 aa, Artificial Sequence
  Description of Artificial Sequence: Synthetic peptide
QEIPMKNV

SEQ ID NO: 16690 - protein, 9 aa, Artificial Sequence
  Description of Artificial Sequence: Synthetic peptide
NETISNGTI

SEQ ID NO: 16691 - protein, 8 aa, Artificial Sequence
  Description of Artificial Sequence: Synthetic peptide
SEIVNQII

SEQ ID NO: 16692 - protein, 11 aa, Artificial Sequence
  Description of Artificial Sequence: Synthetic peptide
AEMELAENREI

SEQ ID NO: 16693 - protein, 10 aa, Artificial Sequence
  Description of Artificial Sequence: Synthetic peptide
AEGKGTISSI

SEQ ID NO: 16694 - protein, 10 aa, Artificial Sequence
  Description of Artificial Sequence: Synthetic peptide
KEAPEEVEKI

SEQ ID NO: 16695 - protein, 8 aa, Artificial Sequence
  Description of Artificial Sequence: Synthetic peptide
QEINMRNV

SEQ ID NO: 16696 - protein, 11 aa, Artificial Sequence
  Description of Artificial Sequence: Synthetic peptide
AELELAENREI

SEQ ID NO: 16697 - protein, 9 aa, Artificial Sequence
  Description of Artificial Sequence: Synthetic peptide
NETEIFRPV

SEQ ID NO: 16698 - protein, 9 aa, Artificial Sequence
  Description of Artificial Sequence: Synthetic peptide
MELAENREI

SEQ ID NO: 16699 - protein, 10 aa, Artificial Sequence
  Description of Artificial Sequence: Synthetic peptide
EELRSLFNTV

SEQ ID NO: 16700 - protein, 10 aa, Artificial Sequence
  Description of Artificial Sequence: Synthetic peptide
GEIIIKSENI

SEQ ID NO: 16701 - protein, 10 aa, Artificial Sequence
  Description of Artificial Sequence: Synthetic peptide
GEIMIRSENI

SEQ ID NO: 16702 - protein, 9 aa, Artificial Sequence
  Description of Artificial Sequence: Synthetic peptide
IEISGKRAI

SEQ ID NO: 16703 - protein, 10 aa, Artificial Sequence
  Description of Artificial Sequence: Synthetic peptide
MEDEDREVLI

SEQ ID NO: 16704 - protein, 9 aa, Artificial Sequence
  Description of Artificial Sequence: Synthetic peptide
LETEPIPGA

SEQ ID NO: 16705 - protein, 8 aa, Artificial Sequence
  Description of Artificial Sequence: Synthetic peptide
QEIPLGNV

SEQ ID NO: 16706 - protein, 9 aa, Artificial Sequence
  Description of Artificial Sequence: Synthetic peptide
NEMEKEGKI

SEQ ID NO: 16707 - protein, 8 aa, Artificial Sequence
  Description of Artificial Sequence: Synthetic peptide
DEDLLRTI

SEQ ID NO: 16708 - protein, 10 aa, Artificial Sequence
  Description of Artificial Sequence: Synthetic peptide
AESFGFGEEI

SEQ ID NO: 16709 - protein, 9 aa, Artificial Sequence
  Description of Artificial Sequence: Synthetic peptide
SESAIRKAI

SEQ ID NO: 16710 - protein, 9 aa, Artificial Sequence
  Description of Artificial Sequence: Synthetic peptide
SETETFRPA

SEQ ID NO: 16711 - protein, 9 aa, Artificial Sequence
  Description of Artificial Sequence: Synthetic peptide
SEVGFPVRP

SEQ ID NO: 16712 - protein, 9 aa, Artificial Sequence
  Description of Artificial Sequence: Synthetic peptide
IEVKDTKEA

SEQ ID NO: 16713 - protein, 9 aa, Artificial Sequence
  Description of Artificial Sequence: Synthetic peptide
NETVPITCA

SEQ ID NO: 16714 - protein, 9 aa, Artificial Sequence
  Description of Artificial Sequence: Synthetic peptide
AEWDRIHPP

SEQ ID NO: 16715 - protein, 9 aa, Artificial Sequence
  Description of Artificial Sequence: Synthetic peptide
AIIGDIRQA

SEQ ID NO: 16716 - protein, 10 aa, Artificial Sequence
  Description of Artificial Sequence: Synthetic peptide
GEVIGDIRKA

SEQ ID NO: 16717 - protein, 9 aa, Artificial Sequence
  Description of Artificial Sequence: Synthetic peptide
LETEPIIGA

SEQ ID NO: 16718 - protein, 9 aa, Artificial Sequence
  Description of Artificial Sequence: Synthetic peptide
REMLKNVTA

SEQ ID NO: 16719 - protein, 9 aa, Artificial Sequence
  Description of Artificial Sequence: Synthetic peptide
IEVRDTKEA

SEQ ID NO: 16720 - protein, 10 aa, Artificial Sequence
  Description of Artificial Sequence: Synthetic peptide
REFPSEQARA

SEQ ID NO: 16721 - protein, 9 aa, Artificial Sequence
  Description of Artificial Sequence: Synthetic peptide
LETEPIPGA

SEQ ID NO: 16722 - protein, 11 aa, Artificial Sequence
  Description of Artificial Sequence: Synthetic peptide
AEAMSQATGAA

SEQ ID NO: 16723 - protein, 9 aa, Artificial Sequence
  Description of Artificial Sequence: Synthetic peptide
KEFNGTGPC

SEQ ID NO: 16724 - protein, 11 aa, Artificial Sequence
  Description of Artificial Sequence: Synthetic peptide
TQIDPDLADQL

SEQ ID NO: 16725 - protein, 9 aa, Artificial Sequence
  Description of Artificial Sequence: Synthetic peptide
KEYNGTGPC

SEQ ID NO: 16726 - protein, 9 aa, Artificial Sequence
  Description of Artificial Sequence: Synthetic peptide
EVIGDIRKA

SEQ ID NO: 16727 - protein, 9 aa, Artificial Sequence
  Description of Artificial Sequence: Synthetic peptide
AETYYVDGA

SEQ ID NO: 16728 - protein, 9 aa, Artificial Sequence
  Description of Artificial Sequence: Synthetic peptide
KEFNGTGLC

SEQ ID NO: 16729 - protein, 10 aa, Artificial Sequence
  Description of Artificial Sequence: Synthetic peptide
REFSPEQARA

SEQ ID NO: 16730 - protein, 9 aa, Artificial Sequence
  Description of Artificial Sequence: Synthetic peptide
RVIEIVQRA

SEQ ID NO: 16731 - protein, 10 aa, Artificial Sequence
  Description of Artificial Sequence: Synthetic peptide
KEKEFNGTGP

SEQ ID NO: 16732 - protein, 11 aa, Artificial Sequence
  Description of Artificial Sequence: Synthetic peptide
AEAMSQASGAA

SEQ ID NO: 16733 - protein, 10 aa, Artificial Sequence
  Description of Artificial Sequence: Synthetic peptide
REFSSEQARA

SEQ ID NO: 16734 - protein, 10 aa, Artificial Sequence
  Description of Artificial Sequence: Synthetic peptide
AEAMSQATGA

SEQ ID NO: 16735 - protein, 9 aa, Artificial Sequence
  Description of Artificial Sequence: Synthetic peptide
AVFLGFLGA

SEQ ID NO: 16736 - protein, 9 aa, Artificial Sequence
  Description of Artificial Sequence: Synthetic peptide
ATLEEMMTA

SEQ ID NO: 16737 - protein, 10 aa, Artificial Sequence
  Description of Artificial Sequence: Synthetic peptide
AETYYVDGAA

SEQ ID NO: 16738 - protein, 10 aa, Artificial Sequence
  Description of Artificial Sequence: Synthetic peptide
SETETFRPAG

SEQ ID NO: 16739 - protein, 9 aa, Artificial Sequence
  Description of Artificial Sequence: Synthetic peptide
AELHAIQLA

SEQ ID NO: 16740 - protein, 10 aa, Artificial Sequence
  Description of Artificial Sequence: Synthetic peptide
AVFLGFLGAA

SEQ ID NO: 16741 - protein, 9 aa, Artificial Sequence
  Description of Artificial Sequence: Synthetic peptide
VVIQDNNEI

SEQ ID NO: 16742 - protein, 9 aa, Artificial Sequence
  Description of Artificial Sequence: Synthetic peptide
SQQEIQQAA

SEQ ID NO: 16743 - protein, 8 aa, Artificial Sequence
  Description of Artificial Sequence: Synthetic peptide
REFPSEQA

SEQ ID NO: 16744 - protein, 9 aa, Artificial Sequence
  Description of Artificial Sequence: Synthetic peptide
EEIAPSPKP

SEQ ID NO: 16745 - protein, 8 aa, Artificial Sequence
  Description of Artificial Sequence: Synthetic peptide
TEIGVGSP

SEQ ID NO: 16746 - protein, 11 aa, Artificial Sequence
  Description of Artificial Sequence: Synthetic peptide
GEAREFPSEQA

SEQ ID NO: 16747 - protein, 9 aa, Artificial Sequence
  Description of Artificial Sequence: Synthetic peptide
AELQAIQLA

SEQ ID NO: 16748 - protein, 9 aa, Artificial Sequence
  Description of Artificial Sequence: Synthetic peptide
RVIEVAQRA

SEQ ID NO: 16749 - protein, 8 aa, Artificial Sequence
  Description of Artificial Sequence: Synthetic peptide
TAFTIPSI

SEQ ID NO: 16750 - protein, 8 aa, Artificial Sequence
  Description of Artificial Sequence: Synthetic peptide
IPLNLPQI

SEQ ID NO: 16751 - protein, 8 aa, Artificial Sequence
  Description of Artificial Sequence: Synthetic peptide
DPWVGNNL

SEQ ID NO: 16752 - protein, 9 aa, Artificial Sequence
  Description of Artificial Sequence: Synthetic peptide
FPISPIETV

SEQ ID NO: 16753 - protein, 8 aa, Artificial Sequence
  Description of Artificial Sequence: Synthetic peptide
VPMEPSEV

SEQ ID NO: 16754 - protein, 8 aa, Artificial Sequence
  Description of Artificial Sequence: Synthetic peptide
DPWIGDNL

SEQ ID NO: 16755 - protein, 8 aa, Artificial Sequence
  Description of Artificial Sequence: Synthetic peptide
LPIAGNLV

SEQ ID NO: 16756 - protein, 9 aa, Artificial Sequence
  Description of Artificial Sequence: Synthetic peptide
DPNTADHLI

SEQ ID NO: 16757 - protein, 8 aa, Artificial Sequence
  Description of Artificial Sequence: Synthetic peptide
DPWVGDNL

SEQ ID NO: 16758 - protein, 10 aa, Artificial Sequence
  Description of Artificial Sequence: Synthetic peptide
IPYNPQSQGV

SEQ ID NO: 16759 - protein, 9 aa, Artificial Sequence
  Description of Artificial Sequence: Synthetic peptide
LPPVVAKEI

SEQ ID NO: 16760 - protein, 9 aa, Artificial Sequence
  Description of Artificial Sequence: Synthetic peptide
LPPIVAKEI

SEQ ID NO: 16761 - protein, 8 aa, Artificial Sequence
  Description of Artificial Sequence: Synthetic peptide
VPMDPAEI

SEQ ID NO: 16762 - protein, 9 aa, Artificial Sequence
  Description of Artificial Sequence: Synthetic peptide
LPHIVAKEI

SEQ ID NO: 16763 - protein, 9 aa, Artificial Sequence
  Description of Artificial Sequence: Synthetic peptide
IPLGDAKLV

SEQ ID NO: 16764 - protein, 9 aa, Artificial Sequence
  Description of Artificial Sequence: Synthetic peptide
NPPVPVGEI

SEQ ID NO: 16765 - protein, 8 aa, Artificial Sequence
  Description of Artificial Sequence: Synthetic peptide
VPVDPAVV

SEQ ID NO: 16766 - protein, 10 aa, Artificial Sequence
  Description of Artificial Sequence: Synthetic peptide
IPLGDAKLVV

SEQ ID NO: 16767 - protein, 8 aa, Artificial Sequence
  Description of Artificial Sequence: Synthetic peptide
SPPIARNI

SEQ ID NO: 16768 - protein, 9 aa, Artificial Sequence
  Description of Artificial Sequence: Synthetic peptide
DPNPQEIAI

SEQ ID NO: 16769 - protein, 8 aa, Artificial Sequence
  Description of Artificial Sequence: Synthetic peptide
TAYFILKL

SEQ ID NO: 16770 - protein, 8 aa, Artificial Sequence
  Description of Artificial Sequence: Synthetic peptide
YPAGHNKV

SEQ ID NO: 16771 - protein, 9 aa, Artificial Sequence
  Description of Artificial Sequence: Synthetic peptide
IPLRDATLV

SEQ ID NO: 16772 - protein, 9 aa, Artificial Sequence
  Description of Artificial Sequence: Synthetic peptide
NPPIPVGEI

SEQ ID NO: 16773 - protein, 8 aa, Artificial Sequence
  Description of Artificial Sequence: Synthetic peptide
IATEGIVI

SEQ ID NO: 16774 - protein, 9 aa, Artificial Sequence
  Description of Artificial Sequence: Synthetic peptide
VPKQPLPTT

SEQ ID NO: 16775 - protein, 8 aa, Artificial Sequence
  Description of Artificial Sequence: Synthetic peptide
QPLEISAI

SEQ ID NO: 16776 - protein, 9 aa, Artificial Sequence
  Description of Artificial Sequence: Synthetic peptide
YAPPIAGNI

SEQ ID NO: 16777 - protein, 11 aa, Artificial Sequence
  Description of Artificial Sequence: Synthetic peptide
IPYNPQSQGVV

SEQ ID NO: 16778 - protein, 9 aa, Artificial Sequence
  Description of Artificial Sequence: Synthetic peptide
DPDLADHLI

SEQ ID NO: 16779 - protein, 8 aa, Artificial Sequence
  Description of Artificial Sequence: Synthetic peptide
VPMDPAEV

SEQ ID NO: 16780 - protein, 9 aa, Artificial Sequence
  Description of Artificial Sequence: Synthetic peptide
EALEEVEKI

SEQ ID NO: 16781 - protein, 8 aa, Artificial Sequence
  Description of Artificial Sequence: Synthetic peptide
SPVSILDI

SEQ ID NO: 16782 - protein, 8 aa, Artificial Sequence
  Description of Artificial Sequence: Synthetic peptide
VGLIVASI

SEQ ID NO: 16783 - protein, 10 aa, Artificial Sequence
  Description of Artificial Sequence: Synthetic peptide
YALPIAGNLV

SEQ ID NO: 16784 - protein, 9 aa, Artificial Sequence
  Description of Artificial Sequence: Synthetic peptide
FPISPIETV

SEQ ID NO: 16785 - protein, 9 aa, Artificial Sequence
  Description of Artificial Sequence: Synthetic peptide
HPQQAGPIA

SEQ ID NO: 16786 - protein, 9 aa, Artificial Sequence
  Description of Artificial Sequence: Synthetic peptide
DANAPLFCA

SEQ ID NO: 16787 - protein, 9 aa, Artificial Sequence
  Description of Artificial Sequence: Synthetic peptide
TPIRQTPPA

SEQ ID NO: 16788 - protein, 9 aa, Artificial Sequence
  Description of Artificial Sequence: Synthetic peptide
LPIAGNLVC

SEQ ID NO: 16789 - protein, 10 aa, Artificial Sequence
  Description of Artificial Sequence: Synthetic peptide
YPSPAGTRQA

SEQ ID NO: 16790 - protein, 11 aa, Artificial Sequence
  Description of Artificial Sequence: Synthetic peptide
IPIGPGQAFYA

SEQ ID NO: 16791 - protein, 9 aa, Artificial Sequence
  Description of Artificial Sequence: Synthetic peptide
FPVRPQVPV

SEQ ID NO: 16792 - protein, 11 aa, Artificial Sequence
  Description of Artificial Sequence: Synthetic peptide
LPHIVAKEIVA

SEQ ID NO: 16793 - protein, 9 aa, Artificial Sequence
  Description of Artificial Sequence: Synthetic peptide
EPIPIHYCA

SEQ ID NO: 16794 - protein, 9 aa, Artificial Sequence
  Description of Artificial Sequence: Synthetic peptide
HVASGYIEA

SEQ ID NO: 16795 - protein, 11 aa, Artificial Sequence
  Description of Artificial Sequence: Synthetic peptide
VPVDPAVVEEA

SEQ ID NO: 16796 - protein, 10 aa, Artificial Sequence
  Description of Artificial Sequence: Synthetic peptide
HPAAAEGVGA

SEQ ID NO: 16797 - protein, 9 aa, Artificial Sequence
  Description of Artificial Sequence: Synthetic peptide
NPYNTPIFA

SEQ ID NO: 16798 - protein, 9 aa, Artificial Sequence
  Description of Artificial Sequence: Synthetic peptide
HPGSQPKTA

SEQ ID NO: 16799 - protein, 11 aa, Artificial Sequence
  Description of Artificial Sequence: Synthetic peptide
FALNPGLLETA

SEQ ID NO: 16800 - protein, 9 aa, Artificial Sequence
  Description of Artificial Sequence: Synthetic peptide
YPLSSLKSL

SEQ ID NO: 16801 - protein, 8 aa, Artificial Sequence
  Description of Artificial Sequence: Synthetic peptide
TAFTIPSI

SEQ ID NO: 16802 - protein, 9 aa, Artificial Sequence
  Description of Artificial Sequence: Synthetic peptide
DPIPIHYCA

SEQ ID NO: 16803 - protein, 11 aa, Artificial Sequence
  Description of Artificial Sequence: Synthetic peptide
VPMEPSEVEEA

SEQ ID NO: 16804 - protein, 9 aa, Artificial Sequence
  Description of Artificial Sequence: Synthetic peptide
EAMSQATGA

SEQ ID NO: 16805 - protein, 11 aa, Artificial Sequence
  Description of Artificial Sequence: Synthetic peptide
VPINDGRNSSA

SEQ ID NO: 16806 - protein, 8 aa, Artificial Sequence
  Description of Artificial Sequence: Synthetic peptide
NPYPSPAG

SEQ ID NO: 16807 - protein, 11 aa, Artificial Sequence
  Description of Artificial Sequence: Synthetic peptide
VPMDPAEIEEA

SEQ ID NO: 16808 - protein, 10 aa, Artificial Sequence
  Description of Artificial Sequence: Synthetic peptide
HSISERILSA

SEQ ID NO: 16809 - protein, 11 aa, Artificial Sequence
  Description of Artificial Sequence: Synthetic peptide
LPPVVAKEIVA

SEQ ID NO: 16810 - protein, 9 aa, Artificial Sequence
  Description of Artificial Sequence: Synthetic peptide
YPLTSLKSL

SEQ ID NO: 16811 - protein, 10 aa, Artificial Sequence
  Description of Artificial Sequence: Synthetic peptide
YPPPEGTRQA

SEQ ID NO: 16812 - protein, 9 aa, Artificial Sequence
  Description of Artificial Sequence: Synthetic peptide
YPIVQNAQG

SEQ ID NO: 16813 - protein, 11 aa, Artificial Sequence
  Description of Artificial Sequence: Synthetic peptide
VPMDPAEVEEA

SEQ ID NO: 16814 - protein, 8 aa, Artificial Sequence
  Description of Artificial Sequence: Synthetic peptide
TAFTIPST

SEQ ID NO: 16815 - protein, 11 aa, Artificial Sequence
  Description of Artificial Sequence: Synthetic peptide
FPISPIETVPV

SEQ ID NO: 16816 - protein, 8 aa, Artificial Sequence
  Description of Artificial Sequence: Synthetic peptide
IPLNLPQI

SEQ ID NO: 16817 - protein, 9 aa, Artificial Sequence
  Description of Artificial Sequence: Synthetic peptide
VPKQPLPTT

SEQ ID NO: 16818 - protein, 9 aa, Artificial Sequence
  Description of Artificial Sequence: Synthetic peptide
SAIVGLIVA

SEQ ID NO: 16819 - protein, 11 aa, Artificial Sequence
  Description of Artificial Sequence: Synthetic peptide
MLNTVGGHQAA

SEQ ID NO: 16820 - protein, 9 aa, Artificial Sequence
  Description of Artificial Sequence: Synthetic peptide
VPLGIPHPG

SEQ ID NO: 16821 - protein, 10 aa, Artificial Sequence
  Description of Artificial Sequence: Synthetic peptide
TPVAAEGVGA

SEQ ID NO: 16822 - protein, 9 aa, Artificial Sequence
  Description of Artificial Sequence: Synthetic peptide
VPKQPFSTT

SEQ ID NO: 16823 - protein, 9 aa, Artificial Sequence
  Description of Artificial Sequence: Synthetic peptide
FAIVGLIVA

SEQ ID NO: 16824 - protein, 9 aa, Artificial Sequence
  Description of Artificial Sequence: Synthetic peptide
QAMYSPPIA

SEQ ID NO: 16825 - protein, 10 aa, Artificial Sequence
  Description of Artificial Sequence: Synthetic peptide
APSAAVGVGA

SEQ ID NO: 16826 - protein, 9 aa, Artificial Sequence
  Description of Artificial Sequence: Synthetic peptide
SISERILSA

SEQ ID NO: 16827 - protein, 9 aa, Artificial Sequence
  Description of Artificial Sequence: Synthetic peptide
VPKQPLPTT

SEQ ID NO: 16828 - protein, 9 aa, Artificial Sequence
  Description of Artificial Sequence: Synthetic peptide
TPIRQTPPA

SEQ ID NO: 16829 - protein, 9 aa, Artificial Sequence
  Description of Artificial Sequence: Synthetic peptide
VPKQPFSTT

SEQ ID NO: 16830 - protein, 10 aa, Artificial Sequence
  Description of Artificial Sequence: Synthetic peptide
YPSPAGTRQA

SEQ ID NO: 16831 - protein, 9 aa, Artificial Sequence
  Description of Artificial Sequence: Synthetic peptide
HPQQAGPIA

SEQ ID NO: 16832 - protein, 9 aa, Artificial Sequence
  Description of Artificial Sequence: Synthetic peptide
FPISPIETV

SEQ ID NO: 16833 - protein, 9 aa, Artificial Sequence
  Description of Artificial Sequence: Synthetic peptide
KAKPPLPSV

SEQ ID NO: 16834 - protein, 10 aa, Artificial Sequence
  Description of Artificial Sequence: Synthetic peptide
APSAAVGVGA

SEQ ID NO: 16835 - protein, 9 aa, Artificial Sequence
  Description of Artificial Sequence: Synthetic peptide
RPEPTAPPA

SEQ ID NO: 16836 - protein, 10 aa, Artificial Sequence
  Description of Artificial Sequence: Synthetic peptide
KPLGVTPTRA

SEQ ID NO: 16837 - protein, 10 aa, Artificial Sequence
  Description of Artificial Sequence: Synthetic peptide
KPLGVAPTKA

SEQ ID NO: 16838 - protein, 9 aa, Artificial Sequence
  Description of Artificial Sequence: Synthetic peptide
VPKQPLPIT

SEQ ID NO: 16839 - protein, 9 aa, Artificial Sequence
  Description of Artificial Sequence: Synthetic peptide
IPIGPGQAF

SEQ ID NO: 16840 - protein, 11 aa, Artificial Sequence
  Description of Artificial Sequence: Synthetic peptide
VPINDGRNSSA

SEQ ID NO: 16841 - protein, 9 aa, Artificial Sequence
  Description of Artificial Sequence: Synthetic peptide
LPIAGNLVC

SEQ ID NO: 16842 - protein, 10 aa, Artificial Sequence
  Description of Artificial Sequence: Synthetic peptide
APSAAVGVGA

SEQ ID NO: 16843 - protein, 9 aa, Artificial Sequence
  Description of Artificial Sequence: Synthetic peptide
FPISPIETV

SEQ ID NO: 16844 - protein, 9 aa, Artificial Sequence
  Description of Artificial Sequence: Synthetic peptide
TPIRQTPPA

SEQ ID NO: 16845 - protein, 10 aa, Artificial Sequence
  Description of Artificial Sequence: Synthetic peptide
HPAAAEGVGA

SEQ ID NO: 16846 - protein, 10 aa, Artificial Sequence
  Description of Artificial Sequence: Synthetic peptide
KPLGVAPTKA

SEQ ID NO: 16847 - protein, 9 aa, Artificial Sequence
  Description of Artificial Sequence: Synthetic peptide
HPQQAGPIA

SEQ ID NO: 16848 - protein, 10 aa, Artificial Sequence
  Description of Artificial Sequence: Synthetic peptide
TPVAAEGVGA

SEQ ID NO: 16849 - protein, 10 aa, Artificial Sequence
  Description of Artificial Sequence: Synthetic peptide
KPLGVTPTRA

SEQ ID NO: 16850 - protein, 11 aa, Artificial Sequence
  Description of Artificial Sequence: Synthetic peptide
VPVDPAVVEEA

SEQ ID NO: 16851 - protein, 10 aa, Artificial Sequence
  Description of Artificial Sequence: Synthetic peptide
TPIRQTPPAA

SEQ ID NO: 16852 - protein, 9 aa, Artificial Sequence
  Description of Artificial Sequence: Synthetic peptide
VPKQPLPTT

SEQ ID NO: 16853 - protein, 10 aa, Artificial Sequence
  Description of Artificial Sequence: Synthetic peptide
IPAETGQETA

SEQ ID NO: 16854 - protein, 10 aa, Artificial Sequence
  Description of Artificial Sequence: Synthetic peptide
YPSPAGTRQA

SEQ ID NO: 16855 - protein, 11 aa, Artificial Sequence
  Description of Artificial Sequence: Synthetic peptide
GPNFISAAVKA

SEQ ID NO: 16856 - protein, 9 aa, Artificial Sequence
  Description of Artificial Sequence: Synthetic peptide
NPYNTPIFA

SEQ ID NO: 16857 - protein, 9 aa, Artificial Sequence
  Description of Artificial Sequence: Synthetic peptide
RPEPTAPPA

SEQ ID NO: 16858 - protein, 9 aa, Artificial Sequence
  Description of Artificial Sequence: Synthetic peptide
VPKQPFSTT

SEQ ID NO: 16859 - protein, 9 aa, Artificial Sequence
  Description of Artificial Sequence: Synthetic peptide
LPIAGNLVC

SEQ ID NO: 16860 - protein, 11 aa, Artificial Sequence
  Description of Artificial Sequence: Synthetic peptide
VPMDPAEIEEA

SEQ ID NO: 16861 - protein, 11 aa, Artificial Sequence
  Description of Artificial Sequence: Synthetic peptide
VPINDGRNSSA

SEQ ID NO: 16862 - protein, 11 aa, Artificial Sequence
  Description of Artificial Sequence: Synthetic peptide
VPMEPSEVEEA

SEQ ID NO: 16863 - protein, 9 aa, Artificial Sequence
  Description of Artificial Sequence: Synthetic peptide
IPIGPGQAF

SEQ ID NO: 16864 - protein, 9 aa, Artificial Sequence
  Description of Artificial Sequence: Synthetic peptide
HPGSQPKTA

SEQ ID NO: 16865 - protein, 9 aa, Artificial Sequence
  Description of Artificial Sequence: Synthetic peptide
QPLEISAIV

SEQ ID NO: 16866 - protein, 10 aa, Artificial Sequence
  Description of Artificial Sequence: Synthetic peptide
IPYNPQSQGV

SEQ ID NO: 16867 - protein, 11 aa, Artificial Sequence
  Description of Artificial Sequence: Synthetic peptide
VPMDPAEVEEA

SEQ ID NO: 16868 - protein, 10 aa, Artificial Sequence
  Description of Artificial Sequence: Synthetic peptide
APSAAVGVGA

SEQ ID NO: 16869 - protein, 9 aa, Artificial Sequence
  Description of Artificial Sequence: Synthetic peptide
FPISPIETV

SEQ ID NO: 16870 - protein, 9 aa, Artificial Sequence
  Description of Artificial Sequence: Synthetic peptide
TPIRQTPPA

SEQ ID NO: 16871 - protein, 10 aa, Artificial Sequence
  Description of Artificial Sequence: Synthetic peptide
KPLGVAPTKA

SEQ ID NO: 16872 - protein, 11 aa, Artificial Sequence
  Description of Artificial Sequence: Synthetic peptide
VPINDGRNSSA

SEQ ID NO: 16873 - protein, 10 aa, Artificial Sequence
  Description of Artificial Sequence: Synthetic peptide
KPLGVTPTRA

SEQ ID NO: 16874 - protein, 9 aa, Artificial Sequence
  Description of Artificial Sequence: Synthetic peptide
VPKQPLPTT

SEQ ID NO: 16875 - protein, 9 aa, Artificial Sequence
  Description of Artificial Sequence: Synthetic peptide
HPQQAGPIA

SEQ ID NO: 16876 - protein, 9 aa, Artificial Sequence
  Description of Artificial Sequence: Synthetic peptide
VPKQPFSTT

SEQ ID NO: 16877 - protein, 9 aa, Artificial Sequence
  Description of Artificial Sequence: Synthetic peptide
LPIAGNLVC

SEQ ID NO: 16878 - protein, 10 aa, Artificial Sequence
  Description of Artificial Sequence: Synthetic peptide
IPYNPQSQGV

SEQ ID NO: 16879 - protein, 10 aa, Artificial Sequence
  Description of Artificial Sequence: Synthetic peptide
YPSPAGTRQA

SEQ ID NO: 16880 - protein, 10 aa, Artificial Sequence
  Description of Artificial Sequence: Synthetic peptide
HPAAAEGVGA

SEQ ID NO: 16881 - protein, 10 aa, Artificial Sequence
  Description of Artificial Sequence: Synthetic peptide
APAGFAILKC

SEQ ID NO: 16882 - protein, 11 aa, Artificial Sequence
  Description of Artificial Sequence: Synthetic peptide
VPVDPAVVEEA

SEQ ID NO: 16883 - protein, 11 aa, Artificial Sequence
  Description of Artificial Sequence: Synthetic peptide
APSAAVGVGAV

SEQ ID NO: 16884 - protein, 10 aa, Artificial Sequence
  Description of Artificial Sequence: Synthetic peptide
TPIRQTPPAA

SEQ ID NO: 16885 - protein, 10 aa, Artificial Sequence
  Description of Artificial Sequence: Synthetic peptide
TPVAAEGVGA

SEQ ID NO: 16886 - protein, 11 aa, Artificial Sequence
  Description of Artificial Sequence: Synthetic peptide
GPNFISAAVKA

SEQ ID NO: 16887 - protein, 10 aa, Artificial Sequence
  Description of Artificial Sequence: Synthetic peptide
IPAETGQETA

SEQ ID NO: 16888 - protein, 11 aa, Artificial Sequence
  Description of Artificial Sequence: Synthetic peptide
VPMEPSEVEEA

SEQ ID NO: 16889 - protein, 9 aa, Artificial Sequence
  Description of Artificial Sequence: Synthetic peptide
RPEPTAPPA

SEQ ID NO: 16890 - protein, 10 aa, Artificial Sequence
  Description of Artificial Sequence: Synthetic peptide
SPEVIPMFSA

SEQ ID NO: 16891 - protein, 9 aa, Artificial Sequence
  Description of Artificial Sequence: Synthetic peptide
HPGSQPKTA

SEQ ID NO: 16892 - protein, 8 aa, Artificial Sequence
  Description of Artificial Sequence: Synthetic peptide
VPMEPSEV

SEQ ID NO: 16893 - protein, 11 aa, Artificial Sequence
  Description of Artificial Sequence: Synthetic peptide
VPMDPAEIEEA

SEQ ID NO: 16894 - protein, 9 aa, Artificial Sequence
  Description of Artificial Sequence: Synthetic peptide
IPIGPGQAF

SEQ ID NO: 16895 - protein, 11 aa, Artificial Sequence
  Description of Artificial Sequence: Synthetic peptide
VPMDPAEVEEA

SEQ ID NO: 16896 - protein, 10 aa, Artificial Sequence
  Description of Artificial Sequence: Synthetic peptide
RPLVTVKIGG

SEQ ID NO: 16897 - protein, 9 aa, Artificial Sequence
  Description of Artificial Sequence: Synthetic peptide
NPYNTPIFA

SEQ ID NO: 16898 - protein, 9 aa, Artificial Sequence
  Description of Artificial Sequence: Synthetic peptide
ATLVVRTYW

SEQ ID NO: 16899 - protein, 9 aa, Artificial Sequence
  Description of Artificial Sequence: Synthetic peptide
STLQEQIRW

SEQ ID NO: 16900 - protein, 11 aa, Artificial Sequence
  Description of Artificial Sequence: Synthetic peptide
KSYSSEKHNVW

SEQ ID NO: 16901 - protein, 9 aa, Artificial Sequence
  Description of Artificial Sequence: Synthetic peptide
LSFPQITLW

SEQ ID NO: 16902 - protein, 11 aa, Artificial Sequence
  Description of Artificial Sequence: Synthetic peptide
KAYSTESHNVW

SEQ ID NO: 16903 - protein, 9 aa, Artificial Sequence
  Description of Artificial Sequence: Synthetic peptide
RVRGTQTNW

SEQ ID NO: 16904 - protein, 9 aa, Artificial Sequence
  Description of Artificial Sequence: Synthetic peptide
RVKGIQRNW

SEQ ID NO: 16905 - protein, 9 aa, Artificial Sequence
  Description of Artificial Sequence: Synthetic peptide
RVKGIERNW

SEQ ID NO: 16906 - protein, 10 aa, Artificial Sequence
  Description of Artificial Sequence: Synthetic peptide
TTNVPWNTSW

SEQ ID NO: 16907 - protein, 9 aa, Artificial Sequence
  Description of Artificial Sequence: Synthetic peptide
YSSEKHNVW

SEQ ID NO: 16908 - protein, 11 aa, Artificial Sequence
  Description of Artificial Sequence: Synthetic peptide
TTSTLQEQIRW

SEQ ID NO: 16909 - protein, 11 aa, Artificial Sequence
  Description of Artificial Sequence: Synthetic peptide
ATSTLQEQIRW

SEQ ID NO: 16910 - protein, 9 aa, Artificial Sequence
  Description of Artificial Sequence: Synthetic peptide
KSLGVAPTR

SEQ ID NO: 16911 - protein, 10 aa, Artificial Sequence
  Description of Artificial Sequence: Synthetic peptide
TSNLQEQIRW

SEQ ID NO: 16912 - protein, 11 aa, Artificial Sequence
  Description of Artificial Sequence: Synthetic peptide
TTSNLQEQIRW

SEQ ID NO: 16913 - protein, 11 aa, Artificial Sequence
  Description of Artificial Sequence: Synthetic peptide
KSIPIGPGQAF

SEQ ID NO: 16914 - protein, 9 aa, Artificial Sequence
  Description of Artificial Sequence: Synthetic peptide
ASIAAIVVW

SEQ ID NO: 16915 - protein, 9 aa, Artificial Sequence
  Description of Artificial Sequence: Synthetic peptide
YSTESHNVW

SEQ ID NO: 16916 - protein, 9 aa, Artificial Sequence
  Description of Artificial Sequence: Synthetic peptide
STRNITEEY

SEQ ID NO: 16917 - protein, 10 aa, Artificial Sequence
  Description of Artificial Sequence: Synthetic peptide
KIATEGIVIW

SEQ ID NO: 16918 - protein, 9 aa, Artificial Sequence
  Description of Artificial Sequence: Synthetic peptide
KIFNKTITF

SEQ ID NO: 16919 - protein, 9 aa, Artificial Sequence
  Description of Artificial Sequence: Synthetic peptide
SIFPQITLW

SEQ ID NO: 16920 - protein, 9 aa, Artificial Sequence
  Description of Artificial Sequence: Synthetic peptide
TVAIAVANW

SEQ ID NO: 16921 - protein, 10 aa, Artificial Sequence
  Description of Artificial Sequence: Synthetic peptide
KQRQDILDLW

SEQ ID NO: 16922 - protein, 11 aa, Artificial Sequence
  Description of Artificial Sequence: Synthetic peptide
ISLNFPQITLW

SEQ ID NO: 16923 - protein, 9 aa, Artificial Sequence
  Description of Artificial Sequence: Synthetic peptide
KSIRLVSGF

SEQ ID NO: 16924 - protein, 10 aa, Artificial Sequence
  Description of Artificial Sequence: Synthetic peptide
SSLKGLRLGW

SEQ ID NO: 16925 - protein, 9 aa, Artificial Sequence
  Description of Artificial Sequence: Synthetic peptide
KSLGIAPTR

SEQ ID NO: 16926 - protein, 10 aa, Artificial Sequence
  Description of Artificial Sequence: Synthetic peptide
RTIRIIKILY

SEQ ID NO: 16927 - protein, 11 aa, Artificial Sequence
  Description of Artificial Sequence: Synthetic peptide
IVASIAAIVVW

SEQ ID NO: 16928 - protein, 9 aa, Artificial Sequence
  Description of Artificial Sequence: Synthetic peptide
HSTESHNIW

SEQ ID NO: 16929 - protein, 10 aa, Artificial Sequence
  Description of Artificial Sequence: Synthetic peptide
TTNVPWNASW

SEQ ID NO: 16930 - protein, 10 aa, Artificial Sequence
  Description of Artificial Sequence: Synthetic peptide
RVIEIVQRAF

SEQ ID NO: 16931 - protein, 10 aa, Artificial Sequence
  Description of Artificial Sequence: Synthetic peptide
KIATEGIIIW

SEQ ID NO: 16932 - protein, 10 aa, Artificial Sequence
  Description of Artificial Sequence: Synthetic peptide
KIATESIVIW

SEQ ID NO: 16933 - protein, 9 aa, Artificial Sequence
  Description of Artificial Sequence: Synthetic peptide
KIKQIVRMW

SEQ ID NO: 16934 - protein, 10 aa, Artificial Sequence
  Description of Artificial Sequence: Synthetic peptide
RVIEVAQRAY

SEQ ID NO: 16935 - protein, 10 aa, Artificial Sequence
  Description of Artificial Sequence: Synthetic peptide
VTVYYGVPVW

SEQ ID NO: 16936 - protein, 10 aa, Artificial Sequence
  Description of Artificial Sequence: Synthetic peptide
SSLKGLSLGW

SEQ ID NO: 16937 - protein, 9 aa, Artificial Sequence
  Description of Artificial Sequence: Synthetic peptide
RIKQIVRMW

SEQ ID NO: 16938 - protein, 9 aa, Artificial Sequence
  Description of Artificial Sequence: Synthetic peptide
LGHGVSIEW

SEQ ID NO: 16939 - protein, 10 aa, Artificial Sequence
  Description of Artificial Sequence: Synthetic peptide
GTRLPLTFGW

SEQ ID NO: 16940 - protein, 11 aa, Artificial Sequence
  Description of Artificial Sequence: Synthetic peptide
KAYSTERHNIW

SEQ ID NO: 16941 - protein, 11 aa, Artificial Sequence
  Description of Artificial Sequence: Synthetic peptide
SVLSGGKLDAW

SEQ ID NO: 16942 - protein, 9 aa, Artificial Sequence
  Description of Artificial Sequence: Synthetic peptide
RAVGVGAVF

SEQ ID NO: 16943 - protein, 11 aa, Artificial Sequence
  Description of Artificial Sequence: Synthetic peptide
KSLFNTVATLY

SEQ ID NO: 16944 - protein, 10 aa, Artificial Sequence
  Description of Artificial Sequence: Synthetic peptide
GTRVPLTFGW

SEQ ID NO: 16945 - protein, 9 aa, Artificial Sequence
  Description of Artificial Sequence: Synthetic peptide
RSIRLVSGF

SEQ ID NO: 16946 - protein, 10 aa, Artificial Sequence
  Description of Artificial Sequence: Synthetic peptide
GTRFPLTFGW

SEQ ID NO: 16947 - protein, 9 aa, Artificial Sequence
  Description of Artificial Sequence: Synthetic peptide
KTAVQMAVF

SEQ ID NO: 16948 - protein, 11 aa, Artificial Sequence
  Description of Artificial Sequence: Synthetic peptide
KSIRFGPGQAF

SEQ ID NO: 16949 - protein, 9 aa, Artificial Sequence
  Description of Artificial Sequence: Synthetic peptide
HTKVGSLQY

SEQ ID NO: 16950 - protein, 11 aa, Artificial Sequence
  Description of Artificial Sequence: Synthetic peptide
SVLSGGKLDSW

SEQ ID NO: 16951 - protein, 9 aa, Artificial Sequence
  Description of Artificial Sequence: Synthetic peptide
WSKSSIVGW

SEQ ID NO: 16952 - protein, 10 aa, Artificial Sequence
  Description of Artificial Sequence: Synthetic peptide
RAVRIIKTLY

SEQ ID NO: 16953 - protein, 9 aa, Artificial Sequence
  Description of Artificial Sequence: Synthetic peptide
QATQEVKSW

SEQ ID NO: 16954 - protein, 9 aa, Artificial Sequence
  Description of Artificial Sequence: Synthetic peptide
IQRNWQHLW

SEQ ID NO: 16955 - protein, 10 aa, Artificial Sequence
  Description of Artificial Sequence: Synthetic peptide
VAIGPGQAFY

SEQ ID NO: 16956 - protein, 9 aa, Artificial Sequence
  Description of Artificial Sequence: Synthetic peptide
KALTDIVSM

SEQ ID NO: 16957 - protein, 9 aa, Artificial Sequence
  Description of Artificial Sequence: Synthetic peptide
VAIGPGQAF

SEQ ID NO: 16958 - protein, 11 aa, Artificial Sequence
  Description of Artificial Sequence: Synthetic peptide
KSIPIGPGQAF

SEQ ID NO: 16959 - protein, 9 aa, Artificial Sequence
  Description of Artificial Sequence: Synthetic peptide
YSTESHNVW

SEQ ID NO: 16960 - protein, 9 aa, Artificial Sequence
  Description of Artificial Sequence: Synthetic peptide
NSNPVSQNY

SEQ ID NO: 16961 - protein, 9 aa, Artificial Sequence
  Description of Artificial Sequence: Synthetic peptide
RAVGVGAVF

SEQ ID NO: 16962 - protein, 9 aa, Artificial Sequence
  Description of Artificial Sequence: Synthetic peptide
KALTDIVSM

SEQ ID NO: 16963 - protein, 11 aa, Artificial Sequence
  Description of Artificial Sequence: Synthetic peptide
RSVAIGPGQAF

SEQ ID NO: 16964 - protein, 11 aa, Artificial Sequence
  Description of Artificial Sequence: Synthetic peptide
KAYSTESHNVW

SEQ ID NO: 16965 - protein, 9 aa, Artificial Sequence
  Description of Artificial Sequence: Synthetic peptide
TVAIAVANW

SEQ ID NO: 16966 - protein, 9 aa, Artificial Sequence
  Description of Artificial Sequence: Synthetic peptide
RAVGVGAIF

SEQ ID NO: 16967 - protein, 9 aa, Artificial Sequence
  Description of Artificial Sequence: Synthetic peptide
STLQEQIRW

SEQ ID NO: 16968 - protein, 9 aa, Artificial Sequence
  Description of Artificial Sequence: Synthetic peptide
SSSQVSQNY

SEQ ID NO: 16969 - protein, 9 aa, Artificial Sequence
  Description of Artificial Sequence: Synthetic peptide
RAIEAQQHL

SEQ ID NO: 16970 - protein, 9 aa, Artificial Sequence
  Description of Artificial Sequence: Synthetic peptide
ASIAAIVVW

SEQ ID NO: 16971 - protein, 9 aa, Artificial Sequence
  Description of Artificial Sequence: Synthetic peptide
QATQEVKSW

SEQ ID NO: 16972 - protein, 9 aa, Artificial Sequence
  Description of Artificial Sequence: Synthetic peptide
NSSQVSQNY

SEQ ID NO: 16973 - protein, 9 aa, Artificial Sequence
  Description of Artificial Sequence: Synthetic peptide
ISNGNKTSY

SEQ ID NO: 16974 - protein, 9 aa, Artificial Sequence
  Description of Artificial Sequence: Synthetic peptide
YSSEKHNVW

SEQ ID NO: 16975 - protein, 9 aa, Artificial Sequence
  Description of Artificial Sequence: Synthetic peptide
RSTRLVSGF

SEQ ID NO: 16976 - protein, 9 aa, Artificial Sequence
  Description of Artificial Sequence: Synthetic peptide
STVGSTAGY

SEQ ID NO: 16977 - protein, 9 aa, Artificial Sequence
  Description of Artificial Sequence: Synthetic peptide
KSIRLVSGF

SEQ ID NO: 16978 - protein, 10 aa, Artificial Sequence
  Description of Artificial Sequence: Synthetic peptide
KIYNNKNITF

SEQ ID NO: 16979 - protein, 9 aa, Artificial Sequence
  Description of Artificial Sequence: Synthetic peptide
KTAVQMAVF

SEQ ID NO: 16980 - protein, 9 aa, Artificial Sequence
  Description of Artificial Sequence: Synthetic peptide
IPIGPGQAF

SEQ ID NO: 16981 - protein, 9 aa, Artificial Sequence
  Description of Artificial Sequence: Synthetic peptide
TIAIAVANW

SEQ ID NO: 16982 - protein, 10 aa, Artificial Sequence
  Description of Artificial Sequence: Synthetic peptide
IAIENVTENF

SEQ ID NO: 16983 - protein, 10 aa, Artificial Sequence
  Description of Artificial Sequence: Synthetic peptide
RAIEAQQHLL

SEQ ID NO: 16984 - protein, 9 aa, Artificial Sequence
  Description of Artificial Sequence: Synthetic peptide
RVRGTQTNW

SEQ ID NO: 16985 - protein, 10 aa, Artificial Sequence
  Description of Artificial Sequence: Synthetic peptide
TAANNPDCAW

SEQ ID NO: 16986 - protein, 9 aa, Artificial Sequence
  Description of Artificial Sequence: Synthetic peptide
RAIEVVQRV

SEQ ID NO: 16987 - protein, 9 aa, Artificial Sequence
  Description of Artificial Sequence: Synthetic peptide
RAVGLGAVF

SEQ ID NO: 16988 - protein, 9 aa, Artificial Sequence
  Description of Artificial Sequence: Synthetic peptide
FSVPLDESF

SEQ ID NO: 16989 - protein, 9 aa, Artificial Sequence
  Description of Artificial Sequence: Synthetic peptide
TINEEAAEW

SEQ ID NO: 16990 - protein, 9 aa, Artificial Sequence
  Description of Artificial Sequence: Synthetic peptide
ASITLTVQV

SEQ ID NO: 16991 - protein, 9 aa, Artificial Sequence
  Description of Artificial Sequence: Synthetic peptide
ISNINNETI

SEQ ID NO: 16992 - protein, 9 aa, Artificial Sequence
  Description of Artificial Sequence: Synthetic peptide
AANNPDCAW

SEQ ID NO: 16993 - protein, 8 aa, Artificial Sequence
  Description of Artificial Sequence: Synthetic peptide
NSPTSREL

SEQ ID NO: 16994 - protein, 9 aa, Artificial Sequence
  Description of Artificial Sequence: Synthetic peptide
YSPLSFQTL

SEQ ID NO: 16995 - protein, 8 aa, Artificial Sequence
  Description of Artificial Sequence: Synthetic peptide
NSPTRREL

SEQ ID NO: 16996 - protein, 9 aa, Artificial Sequence
  Description of Artificial Sequence: Synthetic peptide
YSPVSILDI

SEQ ID NO: 16997 - protein, 9 aa, Artificial Sequence
  Description of Artificial Sequence: Synthetic peptide
VAIGPGQAF

SEQ ID NO: 16998 - protein, 9 aa, Artificial Sequence
  Description of Artificial Sequence: Synthetic peptide
STRNITEEY

SEQ ID NO: 16999 - protein, 10 aa, Artificial Sequence
  Description of Artificial Sequence: Synthetic peptide
VAIGPGQAFY

SEQ ID NO: 17000 - protein, 9 aa, Artificial Sequence
  Description of Artificial Sequence: Synthetic peptide
VAIGPGQAF

SEQ ID NO: 17001 - protein, 11 aa, Artificial Sequence
  Description of Artificial Sequence: Synthetic peptide
ETEPIIGAETY

SEQ ID NO: 17002 - protein, 9 aa, Artificial Sequence
  Description of Artificial Sequence: Synthetic peptide
NSNPVSQNY

SEQ ID NO: 17003 - protein, 9 aa, Artificial Sequence
  Description of Artificial Sequence: Synthetic peptide
STRNITEEY

SEQ ID NO: 17004 - protein, 9 aa, Artificial Sequence
  Description of Artificial Sequence: Synthetic peptide
HTKVGSLQY

SEQ ID NO: 17005 - protein, 9 aa, Artificial Sequence
  Description of Artificial Sequence: Synthetic peptide
DAKLVVSTY

SEQ ID NO: 17006 - protein, 8 aa, Artificial Sequence
  Description of Artificial Sequence: Synthetic peptide
VLDVGDAY

SEQ ID NO: 17007 - protein, 9 aa, Artificial Sequence
  Description of Artificial Sequence: Synthetic peptide
IPIGPGQAF

SEQ ID NO: 17008 - protein, 9 aa, Artificial Sequence
  Description of Artificial Sequence: Synthetic peptide
VAIGPGQAF

SEQ ID NO: 17009 - protein, 9 aa, Artificial Sequence
  Description of Artificial Sequence: Synthetic peptide
SALFNSSSL

SEQ ID NO: 17010 - protein, 9 aa, Artificial Sequence
  Description of Artificial Sequence: Synthetic peptide
RALGPGASL

SEQ ID NO: 17011 - protein, 9 aa, Artificial Sequence
  Description of Artificial Sequence: Synthetic peptide
RAIEAQQHL

SEQ ID NO: 17012 - protein, 9 aa, Artificial Sequence
  Description of Artificial Sequence: Synthetic peptide
RALGPGATL

SEQ ID NO: 17013 - protein, 9 aa, Artificial Sequence
  Description of Artificial Sequence: Synthetic peptide
LAWDDLRSL

SEQ ID NO: 17014 - protein, 9 aa, Artificial Sequence
  Description of Artificial Sequence: Synthetic peptide
RAVGVGAVF

SEQ ID NO: 17015 - protein, 9 aa, Artificial Sequence
  Description of Artificial Sequence: Synthetic peptide
YSTQVDPDL

SEQ ID NO: 17016 - protein, 9 aa, Artificial Sequence
  Description of Artificial Sequence: Synthetic peptide
LALDKWASL

SEQ ID NO: 17017 - protein, 9 aa, Artificial Sequence
  Description of Artificial Sequence: Synthetic peptide
VAIGPGQAF

SEQ ID NO: 17018 - protein, 9 aa, Artificial Sequence
  Description of Artificial Sequence: Synthetic peptide
SALFNSSSL

SEQ ID NO: 17019 - protein, 9 aa, Artificial Sequence
  Description of Artificial Sequence: Synthetic peptide
RALGPGASL

SEQ ID NO: 17020 - protein, 9 aa, Artificial Sequence
  Description of Artificial Sequence: Synthetic peptide
RAIEAQQHL

SEQ ID NO: 17021 - protein, 9 aa, Artificial Sequence
  Description of Artificial Sequence: Synthetic peptide
YSTQVDPDL

SEQ ID NO: 17022 - protein, 9 aa, Artificial Sequence
  Description of Artificial Sequence: Synthetic peptide
MIVGGLISL

SEQ ID NO: 17023 - protein, 9 aa, Artificial Sequence
  Description of Artificial Sequence: Synthetic peptide
YSTQIDPDL

SEQ ID NO: 17024 - protein, 9 aa, Artificial Sequence
  Description of Artificial Sequence: Synthetic peptide
RALGPGATL

SEQ ID NO: 17025 - protein, 8 aa, Artificial Sequence
  Description of Artificial Sequence: Synthetic peptide
HSRIGITL

SEQ ID NO: 17026 - protein, 9 aa, Artificial Sequence
  Description of Artificial Sequence: Synthetic peptide
YVDRFFKTL

SEQ ID NO: 17027 - protein, 9 aa, Artificial Sequence
  Description of Artificial Sequence: Synthetic peptide
LAWDDLRSL

SEQ ID NO: 17028 - protein, 9 aa, Artificial Sequence
  Description of Artificial Sequence: Synthetic peptide
SAEPVPLQL

SEQ ID NO: 17029 - protein, 11 aa, Artificial Sequence
  Description of Artificial Sequence: Synthetic peptide
KSIHLGPGQAL

SEQ ID NO: 17030 - protein, 9 aa, Artificial Sequence
  Description of Artificial Sequence: Synthetic peptide
YYDPSKELI

SEQ ID NO: 17031 - protein, 9 aa, Artificial Sequence
  Description of Artificial Sequence: Synthetic peptide
NFDPIPIHY

SEQ ID NO: 17032 - protein, 9 aa, Artificial Sequence
  Description of Artificial Sequence: Synthetic peptide
QYDQILIEI

SEQ ID NO: 17033 - protein, 9 aa, Artificial Sequence
  Description of Artificial Sequence: Synthetic peptide
SFDPIPIHY

SEQ ID NO: 17034 - protein, 9 aa, Artificial Sequence
  Description of Artificial Sequence: Synthetic peptide
HTDNGPNFI

SEQ ID NO: 17035 - protein, 8 aa, Artificial Sequence
  Description of Artificial Sequence: Synthetic peptide
HTDNGSNF

SEQ ID NO: 17036 - protein, 9 aa, Artificial Sequence
  Description of Artificial Sequence: Synthetic peptide
SAEPVPLQL

SEQ ID NO: 17037 - protein, 9 aa, Artificial Sequence
  Description of Artificial Sequence: Synthetic peptide
IQDNNEIKV

SEQ ID NO: 17038 - protein, 8 aa, Artificial Sequence
  Description of Artificial Sequence: Synthetic peptide
WADITQEF

SEQ ID NO: 17039 - protein, 9 aa, Artificial Sequence
  Description of Artificial Sequence: Synthetic peptide
KAELQAIQL

SEQ ID NO: 17040 - protein, 9 aa, Artificial Sequence
  Description of Artificial Sequence: Synthetic peptide
VLDVGDAYF

SEQ ID NO: 17041 - protein, 9 aa, Artificial Sequence
  Description of Artificial Sequence: Synthetic peptide
ISDNAKVII

SEQ ID NO: 17042 - protein, 9 aa, Artificial Sequence
  Description of Artificial Sequence: Synthetic peptide
QRPLVTVKI

SEQ ID NO: 17043 - protein, 10 aa, Artificial Sequence
  Description of Artificial Sequence: Synthetic peptide
IRFGPGQAFY

SEQ ID NO: 17044 - protein, 9 aa, Artificial Sequence
  Description of Artificial Sequence: Synthetic peptide
QRPLVTVRI

SEQ ID NO: 17045 - protein, 9 aa, Artificial Sequence
  Description of Artificial Sequence: Synthetic peptide
YSPPIARNI

SEQ ID NO: 17046 - protein, 9 aa, Artificial Sequence
  Description of Artificial Sequence: Synthetic peptide
KRKEYALFY

SEQ ID NO: 17047 - protein, 9 aa, Artificial Sequence
  Description of Artificial Sequence: Synthetic peptide
QASGATIMM

SEQ ID NO: 17048 - protein, 9 aa, Artificial Sequence
  Description of Artificial Sequence: Synthetic peptide
VAIGPGQAF

SEQ ID NO: 17049 - protein, 9 aa, Artificial Sequence
  Description of Artificial Sequence: Synthetic peptide
DAKLVVSTY

SEQ ID NO: 17050 - protein, 9 aa, Artificial Sequence
  Description of Artificial Sequence: Synthetic peptide
HLGPGQALY

SEQ ID NO: 17051 - protein, 9 aa, Artificial Sequence
  Description of Artificial Sequence: Synthetic peptide
IPIGPGQAF

SEQ ID NO: 17052 - protein, 9 aa, Artificial Sequence
  Description of Artificial Sequence: Synthetic peptide
SALFNSSSL

SEQ ID NO: 17053 - protein, 9 aa, Artificial Sequence
  Description of Artificial Sequence: Synthetic peptide
STRNITEEY

SEQ ID NO: 17054 - protein, 9 aa, Artificial Sequence
  Description of Artificial Sequence: Synthetic peptide
SAINLIDTV

SEQ ID NO: 17055 - protein, 9 aa, Artificial Sequence
  Description of Artificial Sequence: Synthetic peptide
NVTENFNVW

SEQ ID NO: 17056 - protein, 9 aa, Artificial Sequence
  Description of Artificial Sequence: Synthetic peptide
SAEPVPLQL

SEQ ID NO: 17057 - protein, 9 aa, Artificial Sequence
  Description of Artificial Sequence: Synthetic peptide
FLGAAGSTM

SEQ ID NO: 17058 - protein, 9 aa, Artificial Sequence
  Description of Artificial Sequence: Synthetic peptide
SAINLLDTI

SEQ ID NO: 17059 - protein, 11 aa, Artificial Sequence
  Description of Artificial Sequence: Synthetic peptide
TQIDPDLADQL

SEQ ID NO: 17060 - protein, 11 aa, Artificial Sequence
  Description of Artificial Sequence: Synthetic peptide
TQVDPDLADHL

SEQ ID NO: 17061 - protein, 8 aa, Artificial Sequence
  Description of Artificial Sequence: Synthetic peptide
DVVPINEM

SEQ ID NO: 17062 - protein, 9 aa, Artificial Sequence
  Description of Artificial Sequence: Synthetic peptide
DATLVVRTY

SEQ ID NO: 17063 - protein, 9 aa, Artificial Sequence
  Description of Artificial Sequence: Synthetic peptide
TVLDVGDAY

SEQ ID NO: 17064 - protein, 9 aa, Artificial Sequence
  Description of Artificial Sequence: Synthetic peptide
KALTDIVSM

SEQ ID NO: 17065 - protein, 9 aa, Artificial Sequence
  Description of Artificial Sequence: Synthetic peptide
IVTDSQYAL

SEQ ID NO: 17066 - protein, 9 aa, Artificial Sequence
  Description of Artificial Sequence: Synthetic peptide
VSSDVHIPL

SEQ ID NO: 17067 - protein, 9 aa, Artificial Sequence
  Description of Artificial Sequence: Synthetic peptide
TQNPEIVIY

SEQ ID NO: 17068 - protein, 10 aa, Artificial Sequence
  Description of Artificial Sequence: Synthetic peptide
SVAIGPGQAF

SEQ ID NO: 17069 - protein, 9 aa, Artificial Sequence
  Description of Artificial Sequence: Synthetic peptide
NMRNVTENF

SEQ ID NO: 17070 - protein, 9 aa, Artificial Sequence
  Description of Artificial Sequence: Synthetic peptide
ASDIQTKEL

SEQ ID NO: 17071 - protein, 8 aa, Artificial Sequence
  Description of Artificial Sequence: Synthetic peptide
VGDQAEHL

SEQ ID NO: 17072 - protein, 10 aa, Artificial Sequence
  Description of Artificial Sequence: Synthetic peptide
RAEGKGDTSL

SEQ ID NO: 17073 - protein, 9 aa, Artificial Sequence
  Description of Artificial Sequence: Synthetic peptide
TQDFWEVQL

SEQ ID NO: 17074 - protein, 9 aa, Artificial Sequence
  Description of Artificial Sequence: Synthetic peptide
HTDNGPNFI

SEQ ID NO: 17075 - protein, 9 aa, Artificial Sequence
  Description of Artificial Sequence: Synthetic peptide
SAEPVPLQL

SEQ ID NO: 17076 - protein, 9 aa, Artificial Sequence
  Description of Artificial Sequence: Synthetic peptide
KAELQAIQL

SEQ ID NO: 17077 - protein, 9 aa, Artificial Sequence
  Description of Artificial Sequence: Synthetic peptide
RALGPGATL

SEQ ID NO: 17078 - protein, 9 aa, Artificial Sequence
  Description of Artificial Sequence: Synthetic peptide
RALGPGASL

SEQ ID NO: 17079 - protein, 9 aa, Artificial Sequence
  Description of Artificial Sequence: Synthetic peptide
RAVGLGAVL

SEQ ID NO: 17080 - protein, 9 aa, Artificial Sequence
  Description of Artificial Sequence: Synthetic peptide
NAKNIIVQL

SEQ ID NO: 17081 - protein, 10 aa, Artificial Sequence
  Description of Artificial Sequence: Synthetic peptide
VSFDPIPIHY

SEQ ID NO: 17082 - protein, 10 aa, Artificial Sequence
  Description of Artificial Sequence: Synthetic peptide
VTFEPIPIHY

SEQ ID NO: 17083 - protein, 9 aa, Artificial Sequence
  Description of Artificial Sequence: Synthetic peptide
RAIEVVQRV

SEQ ID NO: 17084 - protein, 11 aa, Artificial Sequence
  Description of Artificial Sequence: Synthetic peptide
KAYSTESHNVW

SEQ ID NO: 17085 - protein, 9 aa, Artificial Sequence
  Description of Artificial Sequence: Synthetic peptide
SAINLIDTV

SEQ ID NO: 17086 - protein, 9 aa, Artificial Sequence
  Description of Artificial Sequence: Synthetic peptide
KAKPPLPSV

SEQ ID NO: 17087 - protein, 9 aa, Artificial Sequence
  Description of Artificial Sequence: Synthetic peptide
GAASITLTV

SEQ ID NO: 17088 - protein, 9 aa, Artificial Sequence
  Description of Artificial Sequence: Synthetic peptide
YSSEKHNVW

SEQ ID NO: 17089 - protein, 9 aa, Artificial Sequence
  Description of Artificial Sequence: Synthetic peptide
ASITLTVQV

SEQ ID NO: 17090 - protein, 9 aa, Artificial Sequence
  Description of Artificial Sequence: Synthetic peptide
YFINKSIEF

SEQ ID NO: 17091 - protein, 9 aa, Artificial Sequence
  Description of Artificial Sequence: Synthetic peptide
IYNNKNITF

SEQ ID NO: 17092 - protein, 9 aa, Artificial Sequence
  Description of Artificial Sequence: Synthetic peptide
VYQEPYKNL

SEQ ID NO: 17093 - protein, 9 aa, Artificial Sequence
  Description of Artificial Sequence: Synthetic peptide
IYQEPYKNL

SEQ ID NO: 17094 - protein, 8 aa, Artificial Sequence
  Description of Artificial Sequence: Synthetic peptide
SFNMTTEL

SEQ ID NO: 17095 - protein, 10 aa, Artificial Sequence
  Description of Artificial Sequence: Synthetic peptide
AFQQGEAREF

SEQ ID NO: 17096 - protein, 9 aa, Artificial Sequence
  Description of Artificial Sequence: Synthetic peptide
VYYDPSKEL

SEQ ID NO: 17097 - protein, 9 aa, Artificial Sequence
  Description of Artificial Sequence: Synthetic peptide
VYYEPSKEL

SEQ ID NO: 17098 - protein, 10 aa, Artificial Sequence
  Description of Artificial Sequence: Synthetic peptide
GFLGTAGSTM

SEQ ID NO: 17099 - protein, 9 aa, Artificial Sequence
  Description of Artificial Sequence: Synthetic peptide
VYHDPSKEL

SEQ ID NO: 17100 - protein, 9 aa, Artificial Sequence
  Description of Artificial Sequence: Synthetic peptide
IFRPGGGDM

SEQ ID NO: 17101 - protein, 10 aa, Artificial Sequence
  Description of Artificial Sequence: Synthetic peptide
GFLGAAGSTM

SEQ ID NO: 17102 - protein, 8 aa, Artificial Sequence
  Description of Artificial Sequence: Synthetic peptide
RFGPGQAF

SEQ ID NO: 17103 - protein, 9 aa, Artificial Sequence
  Description of Artificial Sequence: Synthetic peptide
TYQVYQEPY

SEQ ID NO: 17104 - protein, 9 aa, Artificial Sequence
  Description of Artificial Sequence: Synthetic peptide
IFRPVGGDM

SEQ ID NO: 17105 - protein, 9 aa, Artificial Sequence
  Description of Artificial Sequence: Synthetic peptide
TYQIYQEPY

SEQ ID NO: 17106 - protein, 9 aa, Artificial Sequence
  Description of Artificial Sequence: Synthetic peptide
LFNTVATLY

SEQ ID NO: 17107 - protein, 8 aa, Artificial Sequence
  Description of Artificial Sequence: Synthetic peptide
IFNKTITF

SEQ ID NO: 17108 - protein, 9 aa, Artificial Sequence
  Description of Artificial Sequence: Synthetic peptide
KYHSNWRAM

SEQ ID NO: 17109 - protein, 9 aa, Artificial Sequence
  Description of Artificial Sequence: Synthetic peptide
IYNNKNITF

SEQ ID NO: 17110 - protein, 9 aa, Artificial Sequence
  Description of Artificial Sequence: Synthetic peptide
YFINKSIEF

SEQ ID NO: 17111 - protein, 9 aa, Artificial Sequence
  Description of Artificial Sequence: Synthetic peptide
VYQEPYKNL

SEQ ID NO: 17112 - protein, 8 aa, Artificial Sequence
  Description of Artificial Sequence: Synthetic peptide
SFNMTTEL

SEQ ID NO: 17113 - protein, 9 aa, Artificial Sequence
  Description of Artificial Sequence: Synthetic peptide
VYYEPSKEL

SEQ ID NO: 17114 - protein, 9 aa, Artificial Sequence
  Description of Artificial Sequence: Synthetic peptide
IYQEPYKNL

SEQ ID NO: 17115 - protein, 10 aa, Artificial Sequence
  Description of Artificial Sequence: Synthetic peptide
GFLGTAGSTM

SEQ ID NO: 17116 - protein, 9 aa, Artificial Sequence
  Description of Artificial Sequence: Synthetic peptide
VYYDPSKEL

SEQ ID NO: 17117 - protein, 10 aa, Artificial Sequence
  Description of Artificial Sequence: Synthetic peptide
GFLGAAGSTM

SEQ ID NO: 17118 - protein, 9 aa, Artificial Sequence
  Description of Artificial Sequence: Synthetic peptide
TYQVYQEPY

SEQ ID NO: 17119 - protein, 9 aa, Artificial Sequence
  Description of Artificial Sequence: Synthetic peptide
VAIGPGQAF

SEQ ID NO: 17120 - protein, 9 aa, Artificial Sequence
  Description of Artificial Sequence: Synthetic peptide
VYHDPSKEL

SEQ ID NO: 17121 - protein, 8 aa, Artificial Sequence
  Description of Artificial Sequence: Synthetic peptide
RFGPGQAF

SEQ ID NO: 17122 - protein, 10 aa, Artificial Sequence
  Description of Artificial Sequence: Synthetic peptide
AFQQGEAREF

SEQ ID NO: 17123 - protein, 9 aa, Artificial Sequence
  Description of Artificial Sequence: Synthetic peptide
TYQIYQEPY

SEQ ID NO: 17124 - protein, 9 aa, Artificial Sequence
  Description of Artificial Sequence: Synthetic peptide
NYTQQIYTL

SEQ ID NO: 17125 - protein, 9 aa, Artificial Sequence
  Description of Artificial Sequence: Synthetic peptide
ASITLTVQV

SEQ ID NO: 17126 - protein, 9 aa, Artificial Sequence
  Description of Artificial Sequence: Synthetic peptide
KSNITGLLL

SEQ ID NO: 17127 - protein, 9 aa, Artificial Sequence
  Description of Artificial Sequence: Synthetic peptide
KSNITGLIL

SEQ ID NO: 17128 - protein, 9 aa, Artificial Sequence
  Description of Artificial Sequence: Synthetic peptide
RAIEVVQRV

SEQ ID NO: 17129 - protein, 9 aa, Artificial Sequence
  Description of Artificial Sequence: Synthetic peptide
RSNITGLIL

SEQ ID NO: 17130 - protein, 9 aa, Artificial Sequence
  Description of Artificial Sequence: Synthetic peptide
ASITLTAQV

SEQ ID NO: 17131 - protein, 9 aa, Artificial Sequence
  Description of Artificial Sequence: Synthetic peptide
MSNITGLLL

SEQ ID NO: 17132 - protein, 9 aa, Artificial Sequence
  Description of Artificial Sequence: Synthetic peptide
ISAIVGLIV

SEQ ID NO: 17133 - protein, 9 aa, Artificial Sequence
  Description of Artificial Sequence: Synthetic peptide
QSLGIFAIV

SEQ ID NO: 17134 - protein, 9 aa, Artificial Sequence
  Description of Artificial Sequence: Synthetic peptide
ANSPTSREL

SEQ ID NO: 17135 - protein, 9 aa, Artificial Sequence
  Description of Artificial Sequence: Synthetic peptide
GAASITLTV

SEQ ID NO: 17136 - protein, 9 aa, Artificial Sequence
  Description of Artificial Sequence: Synthetic peptide
NASWSNKTY

SEQ ID NO: 17137 - protein, 9 aa, Artificial Sequence
  Description of Artificial Sequence: Synthetic peptide
NASWSNKSY

SEQ ID NO: 17138 - protein, 9 aa, Artificial Sequence
  Description of Artificial Sequence: Synthetic peptide
DATLVVRTY

SEQ ID NO: 17139 - protein, 8 aa, Artificial Sequence
  Description of Artificial Sequence: Synthetic peptide
TAGYREEL

SEQ ID NO: 17140 - protein, 9 aa, Artificial Sequence
  Description of Artificial Sequence: Synthetic peptide
VAIGPGQAF

SEQ ID NO: 17141 - protein, 9 aa, Artificial Sequence
  Description of Artificial Sequence: Synthetic peptide
YSSEKHNVW

SEQ ID NO: 17142 - protein, 9 aa, Artificial Sequence
  Description of Artificial Sequence: Synthetic peptide
ISNGNKTSY

SEQ ID NO: 17143 - protein, 9 aa, Artificial Sequence
  Description of Artificial Sequence: Synthetic peptide
VSSGIRKVL

SEQ ID NO: 17144 - protein, 8 aa, Artificial Sequence
  Description of Artificial Sequence: Synthetic peptide
TAQVRQLL

SEQ ID NO: 17145 - protein, 9 aa, Artificial Sequence
  Description of Artificial Sequence: Synthetic peptide
NASWSNKTY

SEQ ID NO: 17146 - protein, 9 aa, Artificial Sequence
  Description of Artificial Sequence: Synthetic peptide
RAIEVVQRV

SEQ ID NO: 17147 - protein, 9 aa, Artificial Sequence
  Description of Artificial Sequence: Synthetic peptide
NASWSNKSY

SEQ ID NO: 17148 - protein, 9 aa, Artificial Sequence
  Description of Artificial Sequence: Synthetic peptide
DATLVVRTY

SEQ ID NO: 17149 - protein, 9 aa, Artificial Sequence
  Description of Artificial Sequence: Synthetic peptide
NAKNIIVQL

SEQ ID NO: 17150 - protein, 9 aa, Artificial Sequence
  Description of Artificial Sequence: Synthetic peptide
ANSPTSREL

SEQ ID NO: 17151 - protein, 9 aa, Artificial Sequence
  Description of Artificial Sequence: Synthetic peptide
NGTDRVIEV

SEQ ID NO: 17152 - protein, 9 aa, Artificial Sequence
  Description of Artificial Sequence: Synthetic peptide
KAKPPLPSV

SEQ ID NO: 17153 - protein, 9 aa, Artificial Sequence
  Description of Artificial Sequence: Synthetic peptide
SAINLIDTV

SEQ ID NO: 17154 - protein, 10 aa, Artificial Sequence
  Description of Artificial Sequence: Synthetic peptide
IASDIQTKEL

SEQ ID NO: 17155 - protein, 9 aa, Artificial Sequence
  Description of Artificial Sequence: Synthetic peptide
ASITLTAQV

SEQ ID NO: 17156 - protein, 9 aa, Artificial Sequence
  Description of Artificial Sequence: Synthetic peptide
RAIEAQQHL

SEQ ID NO: 17157 - protein, 9 aa, Artificial Sequence
  Description of Artificial Sequence: Synthetic peptide
TANGTDRVI

SEQ ID NO: 17158 - protein, 9 aa, Artificial Sequence
  Description of Artificial Sequence: Synthetic peptide
GAASITLTV

SEQ ID NO: 17159 - protein, 10 aa, Artificial Sequence
  Description of Artificial Sequence: Synthetic peptide
NENNGTNSTW

SEQ ID NO: 17160 - protein, 9 aa, Artificial Sequence
  Description of Artificial Sequence: Synthetic peptide
VAIGPGQAF

SEQ ID NO: 17161 - protein, 11 aa, Artificial Sequence
  Description of Artificial Sequence: Synthetic peptide
SEVNIVTDSQY

SEQ ID NO: 17162 - protein, 11 aa, Artificial Sequence
  Description of Artificial Sequence: Synthetic peptide
AEQATQEVKGW

SEQ ID NO: 17163 - protein, 9 aa, Artificial Sequence
  Description of Artificial Sequence: Synthetic peptide
SAINLIDTV

SEQ ID NO: 17164 - protein, 9 aa, Artificial Sequence
  Description of Artificial Sequence: Synthetic peptide
SESAIRNAI

SEQ ID NO: 17165 - protein, 11 aa, Artificial Sequence
  Description of Artificial Sequence: Synthetic peptide
AEVQKQGPDQW

SEQ ID NO: 17166 - protein, 9 aa, Artificial Sequence
  Description of Artificial Sequence: Synthetic peptide
VAALQVCFL

SEQ ID NO: 17167 - protein, 10 aa, Artificial Sequence
  Description of Artificial Sequence: Synthetic peptide
RAVGVGAVFL

SEQ ID NO: 17168 - protein, 9 aa, Artificial Sequence
  Description of Artificial Sequence: Synthetic peptide
SAEPVPLQL

SEQ ID NO: 17169 - protein, 10 aa, Artificial Sequence
  Description of Artificial Sequence: Synthetic peptide
RAVGVGAIFL

SEQ ID NO: 17170 - protein, 9 aa, Artificial Sequence
  Description of Artificial Sequence: Synthetic peptide
YALPIAGNL

SEQ ID NO: 17171 - protein, 10 aa, Artificial Sequence
  Description of Artificial Sequence: Synthetic peptide
RAVGLGAVFL

SEQ ID NO: 17172 - protein, 8 aa, Artificial Sequence
  Description of Artificial Sequence: Synthetic peptide
IAARTVEL

SEQ ID NO: 17173 - protein, 9 aa, Artificial Sequence
  Description of Artificial Sequence: Synthetic peptide
SALFNSSSL

SEQ ID NO: 17174 - protein, 8 aa, Artificial Sequence
  Description of Artificial Sequence: Synthetic peptide
FALNPDLL

SEQ ID NO: 17175 - protein, 11 aa, Artificial Sequence
  Description of Artificial Sequence: Synthetic peptide
ETEPIAGAETY

SEQ ID NO: 17176 - protein, 11 aa, Artificial Sequence
  Description of Artificial Sequence: Synthetic peptide
ETEPIVGAETY

SEQ ID NO: 17177 - protein, 11 aa, Artificial Sequence
  Description of Artificial Sequence: Synthetic peptide
ETEPIEGAETY

SEQ ID NO: 17178 - protein, 9 aa, Artificial Sequence
  Description of Artificial Sequence: Synthetic peptide
GTEDLQSLY

SEQ ID NO: 17179 - protein, 9 aa, Artificial Sequence
  Description of Artificial Sequence: Synthetic peptide
NSSYTNDTY

SEQ ID NO: 17180 - protein, 9 aa, Artificial Sequence
  Description of Artificial Sequence: Synthetic peptide
PIDNNSTQY

SEQ ID NO: 17181 - protein, 8 aa, Artificial Sequence
  Description of Artificial Sequence: Synthetic peptide
VLDVGDAY

SEQ ID NO: 17182 - protein, 9 aa, Artificial Sequence
  Description of Artificial Sequence: Synthetic peptide
SFDPIPIHY

SEQ ID NO: 17183 - protein, 10 aa, Artificial Sequence
  Description of Artificial Sequence: Synthetic peptide
VTVLDVGDAY

SEQ ID NO: 17184 - protein, 10 aa, Artificial Sequence
  Description of Artificial Sequence: Synthetic peptide
VSVLDVGDAY

SEQ ID NO: 17185 - protein, 9 aa, Artificial Sequence
  Description of Artificial Sequence: Synthetic peptide
VLAEAMSQV

SEQ ID NO: 17186 - protein, 9 aa, Artificial Sequence
  Description of Artificial Sequence: Synthetic peptide
TLYNVVNQL

SEQ ID NO: 17187 - protein, 9 aa, Artificial Sequence
  Description of Artificial Sequence: Synthetic peptide
QLTEVVQKI

SEQ ID NO: 17188 - protein, 10 aa, Artificial Sequence
  Description of Artificial Sequence: Synthetic peptide
KLIPVDPQEV

SEQ ID NO: 17189 - protein, 9 aa, Artificial Sequence
  Description of Artificial Sequence: Synthetic peptide
SLFGSDPLL

SEQ ID NO: 17190 - protein, 10 aa, Artificial Sequence
  Description of Artificial Sequence: Synthetic peptide
FLDGIDKAQV

SEQ ID NO: 17191 - protein, 9 aa, Artificial Sequence
  Description of Artificial Sequence: Synthetic peptide
TVLSIINSV

SEQ ID NO: 17192 - protein, 9 aa, Artificial Sequence
  Description of Artificial Sequence: Synthetic peptide
ALQESGPEV

SEQ ID NO: 17193 - protein, 9 aa, Artificial Sequence
  Description of Artificial Sequence: Synthetic peptide
LLNGSLAEV

SEQ ID NO: 17194 - protein, 8 aa, Artificial Sequence
  Description of Artificial Sequence: Synthetic peptide
NLGYVADV

SEQ ID NO: 17195 - protein, 10 aa, Artificial Sequence
  Description of Artificial Sequence: Synthetic peptide
KLVPVDPQEV

SEQ ID NO: 17196 - protein, 9 aa, Artificial Sequence
  Description of Artificial Sequence: Synthetic peptide
GLCTNVSTV

SEQ ID NO: 17197 - protein, 9 aa, Artificial Sequence
  Description of Artificial Sequence: Synthetic peptide
QLTEAVQKI

SEQ ID NO: 17198 - protein, 9 aa, Artificial Sequence
  Description of Artificial Sequence: Synthetic peptide
ILGQLQPAL

SEQ ID NO: 17199 - protein, 9 aa, Artificial Sequence
  Description of Artificial Sequence: Synthetic peptide
SLQDHQNSI

SEQ ID NO: 17200 - protein, 9 aa, Artificial Sequence
  Description of Artificial Sequence: Synthetic peptide
ALTEIVPLT

SEQ ID NO: 17201 - protein, 10 aa, Artificial Sequence
  Description of Artificial Sequence: Synthetic peptide
ALNPGLLESA

SEQ ID NO: 17202 - protein, 9 aa, Artificial Sequence
  Description of Artificial Sequence: Synthetic peptide
GLADQLIHM

SEQ ID NO: 17203 - protein, 10 aa, Artificial Sequence
  Description of Artificial Sequence: Synthetic peptide
TLWQRPLVTV

SEQ ID NO: 17204 - protein, 9 aa, Artificial Sequence
  Description of Artificial Sequence: Synthetic peptide
AVLSIVNRV

SEQ ID NO: 17205 - protein, 10 aa, Artificial Sequence
  Description of Artificial Sequence: Synthetic peptide
YVDNGTNVTL

SEQ ID NO: 17206 - protein, 9 aa, Artificial Sequence
  Description of Artificial Sequence: Synthetic peptide
SLAEGQVII

SEQ ID NO: 17207 - protein, 9 aa, Artificial Sequence
  Description of Artificial Sequence: Synthetic peptide
ALTEICTEM

SEQ ID NO: 17208 - protein, 10 aa, Artificial Sequence
  Description of Artificial Sequence: Synthetic peptide
TLWQRPIVTV

SEQ ID NO: 17209 - protein, 10 aa, Artificial Sequence
  Description of Artificial Sequence: Synthetic peptide
KLVPVNPQEV

SEQ ID NO: 17210 - protein, 9 aa, Artificial Sequence
  Description of Artificial Sequence: Synthetic peptide
ALTDVVPLT

SEQ ID NO: 17211 - protein, 9 aa, Artificial Sequence
  Description of Artificial Sequence: Synthetic peptide
ILREPVHGV

SEQ ID NO: 17212 - protein, 11 aa, Artificial Sequence
  Description of Artificial Sequence: Synthetic peptide
VLDVGGAYFSV

SEQ ID NO: 17213 - protein, 9 aa, Artificial Sequence
  Description of Artificial Sequence: Synthetic peptide
IVTDSQYAL

SEQ ID NO: 17214 - protein, 9 aa, Artificial Sequence
  Description of Artificial Sequence: Synthetic peptide
VLAEAMSQV

SEQ ID NO: 17215 - protein, 9 aa, Artificial Sequence
  Description of Artificial Sequence: Synthetic peptide
ILREPVHGV

SEQ ID NO: 17216 - protein, 9 aa, Artificial Sequence
  Description of Artificial Sequence: Synthetic peptide
TLYNVVNQL

SEQ ID NO: 17217 - protein, 9 aa, Artificial Sequence
  Description of Artificial Sequence: Synthetic peptide
ILREPIHGV

SEQ ID NO: 17218 - protein, 10 aa, Artificial Sequence
  Description of Artificial Sequence: Synthetic peptide
KLIPVDPQEV

SEQ ID NO: 17219 - protein, 9 aa, Artificial Sequence
  Description of Artificial Sequence: Synthetic peptide
VVKIEPLGV

SEQ ID NO: 17220 - protein, 9 aa, Artificial Sequence
  Description of Artificial Sequence: Synthetic peptide
QLTEVVQKI

SEQ ID NO: 17221 - protein, 9 aa, Artificial Sequence
  Description of Artificial Sequence: Synthetic peptide
TLNAWVKVV

SEQ ID NO: 17222 - protein, 9 aa, Artificial Sequence
  Description of Artificial Sequence: Synthetic peptide
GLCTNVSTV

SEQ ID NO: 17223 - protein, 9 aa, Artificial Sequence
  Description of Artificial Sequence: Synthetic peptide
ILKEPVHGA

SEQ ID NO: 17224 - protein, 10 aa, Artificial Sequence
  Description of Artificial Sequence: Synthetic peptide
ALNPGLLESA

SEQ ID NO: 17225 - protein, 10 aa, Artificial Sequence
  Description of Artificial Sequence: Synthetic peptide
TLWQRPLVTV

SEQ ID NO: 17226 - protein, 10 aa, Artificial Sequence
  Description of Artificial Sequence: Synthetic peptide
YLKDQQLLGI

SEQ ID NO: 17227 - protein, 9 aa, Artificial Sequence
  Description of Artificial Sequence: Synthetic peptide
TLHQVVTQL

SEQ ID NO: 17228 - protein, 10 aa, Artificial Sequence
  Description of Artificial Sequence: Synthetic peptide
YLRDQQLLGI

SEQ ID NO: 17229 - protein, 9 aa, Artificial Sequence
  Description of Artificial Sequence: Synthetic peptide
LLNGSLAEV

SEQ ID NO: 17230 - protein, 10 aa, Artificial Sequence
  Description of Artificial Sequence: Synthetic peptide
TLWQRPIVTV

SEQ ID NO: 17231 - protein, 9 aa, Artificial Sequence
  Description of Artificial Sequence: Synthetic peptide
KIKPPLPSV

SEQ ID NO: 17232 - protein, 9 aa, Artificial Sequence
  Description of Artificial Sequence: Synthetic peptide
TVLSIINSV

SEQ ID NO: 17233 - protein, 10 aa, Artificial Sequence
  Description of Artificial Sequence: Synthetic peptide
KLVPVNPQEV

SEQ ID NO: 17234 - protein, 9 aa, Artificial Sequence
  Description of Artificial Sequence: Synthetic peptide
VLAEAMSQM

SEQ ID NO: 17235 - protein, 10 aa, Artificial Sequence
  Description of Artificial Sequence: Synthetic peptide
KLVPVDPQEV

SEQ ID NO: 17236 - protein, 9 aa, Artificial Sequence
  Description of Artificial Sequence: Synthetic peptide
QLQARVLAV

SEQ ID NO: 17237 - protein, 11 aa, Artificial Sequence
  Description of Artificial Sequence: Synthetic peptide
FLKEKGGLEGL

SEQ ID NO: 17238 - protein, 9 aa, Artificial Sequence
  Description of Artificial Sequence: Synthetic peptide
GAASITLTV

SEQ ID NO: 17239 - protein, 9 aa, Artificial Sequence
  Description of Artificial Sequence: Synthetic peptide
ALNPGLLET

SEQ ID NO: 17240 - protein, 11 aa, Artificial Sequence
  Description of Artificial Sequence: Synthetic peptide
FLKEKGGLDGL

SEQ ID NO: 17241 - protein, 9 aa, Artificial Sequence
  Description of Artificial Sequence: Synthetic peptide
AVLSIVNRV

SEQ ID NO: 17242 - protein, 9 aa, Artificial Sequence
  Description of Artificial Sequence: Synthetic peptide
QLTEAVQKI

SEQ ID NO: 17243 - protein, 9 aa, Artificial Sequence
  Description of Artificial Sequence: Synthetic peptide
SLLIVIRTV

SEQ ID NO: 17244 - protein, 9 aa, Artificial Sequence
  Description of Artificial Sequence: Synthetic peptide
RTKPPLPSV

SEQ ID NO: 17245 - protein, 9 aa, Artificial Sequence
  Description of Artificial Sequence: Synthetic peptide
ALTRILQQL

SEQ ID NO: 17246 - protein, 10 aa, Artificial Sequence
  Description of Artificial Sequence: Synthetic peptide
ALIGLRIIFA

SEQ ID NO: 17247 - protein, 9 aa, Artificial Sequence
  Description of Artificial Sequence: Synthetic peptide
SLAEGQVII

SEQ ID NO: 17248 - protein, 9 aa, Artificial Sequence
  Description of Artificial Sequence: Synthetic peptide
ALIRTLQQL

SEQ ID NO: 17249 - protein, 9 aa, Artificial Sequence
  Description of Artificial Sequence: Synthetic peptide
KTKPPLPSV

SEQ ID NO: 17250 - protein, 9 aa, Artificial Sequence
  Description of Artificial Sequence: Synthetic peptide
ELKKIIGQV

SEQ ID NO: 17251 - protein, 8 aa, Artificial Sequence
  Description of Artificial Sequence: Synthetic peptide
VLSIVNRV

SEQ ID NO: 17252 - protein, 9 aa, Artificial Sequence
  Description of Artificial Sequence: Synthetic peptide
ALFYRIDVV

SEQ ID NO: 17253 - protein, 9 aa, Artificial Sequence
  Description of Artificial Sequence: Synthetic peptide
TLHKVITKL

SEQ ID NO: 17254 - protein, 9 aa, Artificial Sequence
  Description of Artificial Sequence: Synthetic peptide
LLSIVARTV

SEQ ID NO: 17255 - protein, 10 aa, Artificial Sequence
  Description of Artificial Sequence: Synthetic peptide
KVVKIEPLGV

SEQ ID NO: 17256 - protein, 9 aa, Artificial Sequence
  Description of Artificial Sequence: Synthetic peptide
VVKIEPLGI

SEQ ID NO: 17257 - protein, 9 aa, Artificial Sequence
  Description of Artificial Sequence: Synthetic peptide
EVIGNIRQA

SEQ ID NO: 17258 - protein, 9 aa, Artificial Sequence
  Description of Artificial Sequence: Synthetic peptide
ALFYRLDVV

SEQ ID NO: 17259 - protein, 8 aa, Artificial Sequence
  Description of Artificial Sequence: Synthetic peptide
VLSIINSV

SEQ ID NO: 17260 - protein, 9 aa, Artificial Sequence
  Description of Artificial Sequence: Synthetic peptide
SLYNTIAVL

SEQ ID NO: 17261 - protein, 9 aa, Artificial Sequence
  Description of Artificial Sequence: Synthetic peptide
VLRDKQQKV

SEQ ID NO: 17262 - protein, 10 aa, Artificial Sequence
  Description of Artificial Sequence: Synthetic peptide
ALNPDLLETA

SEQ ID NO: 17263 - protein, 9 aa, Artificial Sequence
  Description of Artificial Sequence: Synthetic peptide
SLQDHQNSI

SEQ ID NO: 17264 - protein, 9 aa, Artificial Sequence
  Description of Artificial Sequence: Synthetic peptide
LLNTTAIAV

SEQ ID NO: 17265 - protein, 9 aa, Artificial Sequence
  Description of Artificial Sequence: Synthetic peptide
TLYNVVNQL

SEQ ID NO: 17266 - protein, 9 aa, Artificial Sequence
  Description of Artificial Sequence: Synthetic peptide
SITNWLWYI

SEQ ID NO: 17267 - protein, 9 aa, Artificial Sequence
  Description of Artificial Sequence: Synthetic peptide
LLLYWGQEL

SEQ ID NO: 17268 - protein, 9 aa, Artificial Sequence
  Description of Artificial Sequence: Synthetic peptide
TLHQVVTQL

SEQ ID NO: 17269 - protein, 9 aa, Artificial Sequence
  Description of Artificial Sequence: Synthetic peptide
SLLIVIRTV

SEQ ID NO: 17270 - protein, 9 aa, Artificial Sequence
  Description of Artificial Sequence: Synthetic peptide
TVLSIINSV

SEQ ID NO: 17271 - protein, 9 aa, Artificial Sequence
  Description of Artificial Sequence: Synthetic peptide
TLNAWVKVV

SEQ ID NO: 17272 - protein, 9 aa, Artificial Sequence
  Description of Artificial Sequence: Synthetic peptide
AVLSIVNRV

SEQ ID NO: 17273 - protein, 9 aa, Artificial Sequence
  Description of Artificial Sequence: Synthetic peptide
QLTEVVQKI

SEQ ID NO: 17274 - protein, 9 aa, Artificial Sequence
  Description of Artificial Sequence: Synthetic peptide
TLHKVITKL

SEQ ID NO: 17275 - protein, 9 aa, Artificial Sequence
  Description of Artificial Sequence: Synthetic peptide
TVLEEINLL

SEQ ID NO: 17276 - protein, 9 aa, Artificial Sequence
  Description of Artificial Sequence: Synthetic peptide
ALIRTLQQL

SEQ ID NO: 17277 - protein, 9 aa, Artificial Sequence
  Description of Artificial Sequence: Synthetic peptide
LLQYWGQEL

SEQ ID NO: 17278 - protein, 9 aa, Artificial Sequence
  Description of Artificial Sequence: Synthetic peptide
ALTRILQQL

SEQ ID NO: 17279 - protein, 10 aa, Artificial Sequence
  Description of Artificial Sequence: Synthetic peptide
TLWQRPLVTV

SEQ ID NO: 17280 - protein, 9 aa, Artificial Sequence
  Description of Artificial Sequence: Synthetic peptide
ILREPIHGV

SEQ ID NO: 17281 - protein, 10 aa, Artificial Sequence
  Description of Artificial Sequence: Synthetic peptide
KLIPVDPQEV

SEQ ID NO: 17282 - protein, 9 aa, Artificial Sequence
  Description of Artificial Sequence: Synthetic peptide
SLYNTIAVL

SEQ ID NO: 17283 - protein, 9 aa, Artificial Sequence
  Description of Artificial Sequence: Synthetic peptide
ILREPVHGV

SEQ ID NO: 17284 - protein, 9 aa, Artificial Sequence
  Description of Artificial Sequence: Synthetic peptide
SLFGSDPLL

SEQ ID NO: 17285 - protein, 9 aa, Artificial Sequence
  Description of Artificial Sequence: Synthetic peptide
TLQQIATQL

SEQ ID NO: 17286 - protein, 10 aa, Artificial Sequence
  Description of Artificial Sequence: Synthetic peptide
TLWQRPIVTV

SEQ ID NO: 17287 - protein, 9 aa, Artificial Sequence
  Description of Artificial Sequence: Synthetic peptide
ILGQLQPAL

SEQ ID NO: 17288 - protein, 9 aa, Artificial Sequence
  Description of Artificial Sequence: Synthetic peptide
ALTDIIPLT

SEQ ID NO: 17289 - protein, 9 aa, Artificial Sequence
  Description of Artificial Sequence: Synthetic peptide
GLADQLIHM

SEQ ID NO: 17290 - protein, 9 aa, Artificial Sequence
  Description of Artificial Sequence: Synthetic peptide
MLQLTVWGV

SEQ ID NO: 17291 - protein, 10 aa, Artificial Sequence
  Description of Artificial Sequence: Synthetic peptide
NLLQYWGQEL

SEQ ID NO: 17292 - protein, 9 aa, Artificial Sequence
  Description of Artificial Sequence: Synthetic peptide
LVWQDLWNL

SEQ ID NO: 17293 - protein, 9 aa, Artificial Sequence
  Description of Artificial Sequence: Synthetic peptide
LLLIVVRTV

SEQ ID NO: 17294 - protein, 9 aa, Artificial Sequence
  Description of Artificial Sequence: Synthetic peptide
KIKPPLPSV

SEQ ID NO: 17295 - protein, 9 aa, Artificial Sequence
  Description of Artificial Sequence: Synthetic peptide
SLWRWGTLI

SEQ ID NO: 17296 - protein, 9 aa, Artificial Sequence
  Description of Artificial Sequence: Synthetic peptide
HLEGKIILV

SEQ ID NO: 17297 - protein, 9 aa, Artificial Sequence
  Description of Artificial Sequence: Synthetic peptide
NITGLILTL

SEQ ID NO: 17298 - protein, 9 aa, Artificial Sequence
  Description of Artificial Sequence: Synthetic peptide
ALTEIVPLT

SEQ ID NO: 17299 - protein, 10 aa, Artificial Sequence
  Description of Artificial Sequence: Synthetic peptide
NLLLYWGQEL

SEQ ID NO: 17300 - protein, 10 aa, Artificial Sequence
  Description of Artificial Sequence: Synthetic peptide
KLVPVNPQEV

SEQ ID NO: 17301 - protein, 9 aa, Artificial Sequence
  Description of Artificial Sequence: Synthetic peptide
LLNTTAIAV

SEQ ID NO: 17302 - protein, 10 aa, Artificial Sequence
  Description of Artificial Sequence: Synthetic peptide
KLVPVDPQEV

SEQ ID NO: 17303 - protein, 9 aa, Artificial Sequence
  Description of Artificial Sequence: Synthetic peptide
VLAEAMSQV

SEQ ID NO: 17304 - protein, 9 aa, Artificial Sequence
  Description of Artificial Sequence: Synthetic peptide
ALTDVVPLT

SEQ ID NO: 17305 - protein, 9 aa, Artificial Sequence
  Description of Artificial Sequence: Synthetic peptide
VIWGKIPKF

SEQ ID NO: 17306 - protein, 9 aa, Artificial Sequence
  Description of Artificial Sequence: Synthetic peptide
AALDLSHFL

SEQ ID NO: 17307 - protein, 11 aa, Artificial Sequence
  Description of Artificial Sequence: Synthetic peptide
SVLSGGRLDTL

SEQ ID NO: 17308 - protein, 9 aa, Artificial Sequence
  Description of Artificial Sequence: Synthetic peptide
IVWDDLRSL

SEQ ID NO: 17309 - protein, 9 aa, Artificial Sequence
  Description of Artificial Sequence: Synthetic peptide
LLNGSLAEV

SEQ ID NO: 17310 - protein, 9 aa, Artificial Sequence
  Description of Artificial Sequence: Synthetic peptide
NLVAVLYCV

SEQ ID NO: 17311 - protein, 9 aa, Artificial Sequence
  Description of Artificial Sequence: Synthetic peptide
IIAIVVWTI

SEQ ID NO: 17312 - protein, 9 aa, Artificial Sequence
  Description of Artificial Sequence: Synthetic peptide
SLFNLVAVL

SEQ ID NO: 17313 - protein, 9 aa, Artificial Sequence
  Description of Artificial Sequence: Synthetic peptide
LLNTTAIVV

SEQ ID NO: 17314 - protein, 9 aa, Artificial Sequence
  Description of Artificial Sequence: Synthetic peptide
NITGLILTI

SEQ ID NO: 17315 - protein, 9 aa, Artificial Sequence
  Description of Artificial Sequence: Synthetic peptide
VVWDDLRSL

SEQ ID NO: 17316 - protein, 9 aa, Artificial Sequence
  Description of Artificial Sequence: Synthetic peptide
ALQESGPEV

SEQ ID NO: 17317 - protein, 9 aa, Artificial Sequence
  Description of Artificial Sequence: Synthetic peptide
ALFYRIDVV

SEQ ID NO: 17318 - protein, 9 aa, Artificial Sequence
  Description of Artificial Sequence: Synthetic peptide
IVTDSQYAL

SEQ ID NO: 17319 - protein, 9 aa, Artificial Sequence
  Description of Artificial Sequence: Synthetic peptide
HLEGKVILV

SEQ ID NO: 17320 - protein, 11 aa, Artificial Sequence
  Description of Artificial Sequence: Synthetic peptide
FLKEKGGLEGL

SEQ ID NO: 17321 - protein, 11 aa, Artificial Sequence
  Description of Artificial Sequence: Synthetic peptide
ALFYRADIVQI

SEQ ID NO: 17322 - protein, 9 aa, Artificial Sequence
  Description of Artificial Sequence: Synthetic peptide
LVNQIIEEL

SEQ ID NO: 17323 - protein, 9 aa, Artificial Sequence
  Description of Artificial Sequence: Synthetic peptide
SIVARTVEL

SEQ ID NO: 17324 - protein, 10 aa, Artificial Sequence
  Description of Artificial Sequence: Synthetic peptide
ALNPGLLESA

SEQ ID NO: 17325 - protein, 9 aa, Artificial Sequence
  Description of Artificial Sequence: Synthetic peptide
FPRDWLHQL

SEQ ID NO: 17326 - protein, 9 aa, Artificial Sequence
  Description of Artificial Sequence: Synthetic peptide
RTKPPLPSV

SEQ ID NO: 17327 - protein, 9 aa, Artificial Sequence
  Description of Artificial Sequence: Synthetic peptide
ALNPGLLET

SEQ ID NO: 17328 - protein, 9 aa, Artificial Sequence
  Description of Artificial Sequence: Synthetic peptide
ALFYRLDVV

SEQ ID NO: 17329 - protein, 10 aa, Artificial Sequence
  Description of Artificial Sequence: Synthetic peptide
LLIVIRTVEL

SEQ ID NO: 17330 - protein, 9 aa, Artificial Sequence
  Description of Artificial Sequence: Synthetic peptide
IIAVIVWTI

SEQ ID NO: 17331 - protein, 9 aa, Artificial Sequence
  Description of Artificial Sequence: Synthetic peptide
NYTEVIYRL

SEQ ID NO: 17332 - protein, 9 aa, Artificial Sequence
  Description of Artificial Sequence: Synthetic peptide
DISHWLWYI

SEQ ID NO: 17333 - protein, 10 aa, Artificial Sequence
  Description of Artificial Sequence: Synthetic peptide
IMIVGGIIGL

SEQ ID NO: 17334 - protein, 9 aa, Artificial Sequence
  Description of Artificial Sequence: Synthetic peptide
KQVGTLQYL

SEQ ID NO: 17335 - protein, 9 aa, Artificial Sequence
  Description of Artificial Sequence: Synthetic peptide
TLQEQIAWM

SEQ ID NO: 17336 - protein, 9 aa, Artificial Sequence
  Description of Artificial Sequence: Synthetic peptide
HLEGQVILV

SEQ ID NO: 17337 - protein, 10 aa, Artificial Sequence
  Description of Artificial Sequence: Synthetic peptide
FLDGIDKAQV

SEQ ID NO: 17338 - protein, 9 aa, Artificial Sequence
  Description of Artificial Sequence: Synthetic peptide
GALDLSHFL

SEQ ID NO: 17339 - protein, 11 aa, Artificial Sequence
  Description of Artificial Sequence: Synthetic peptide
VQLGIPHPAGL

SEQ ID NO: 17340 - protein, 10 aa, Artificial Sequence
  Description of Artificial Sequence: Synthetic peptide
RTQDFWEVQL

SEQ ID NO: 17341 - protein, 9 aa, Artificial Sequence
  Description of Artificial Sequence: Synthetic peptide
SLSLFSYRL

SEQ ID NO: 17342 - protein, 10 aa, Artificial Sequence
  Description of Artificial Sequence: Synthetic peptide
YLRDQQLLGI

SEQ ID NO: 17343 - protein, 9 aa, Artificial Sequence
  Description of Artificial Sequence: Synthetic peptide
ILTQIGCTL

SEQ ID NO: 17344 - protein, 9 aa, Artificial Sequence
  Description of Artificial Sequence: Synthetic peptide
YPRPWLHDL

SEQ ID NO: 17345 - protein, 9 aa, Artificial Sequence
  Description of Artificial Sequence: Synthetic peptide
IIVWTIVYL

SEQ ID NO: 17346 - protein, 9 aa, Artificial Sequence
  Description of Artificial Sequence: Synthetic peptide
NTKNIIVQL

SEQ ID NO: 17347 - protein, 9 aa, Artificial Sequence
  Description of Artificial Sequence: Synthetic peptide
SLAEGQVII

SEQ ID NO: 17348 - protein, 9 aa, Artificial Sequence
  Description of Artificial Sequence: Synthetic peptide
KLTPLCVTL

SEQ ID NO: 17349 - protein, 10 aa, Artificial Sequence
  Description of Artificial Sequence: Synthetic peptide
ALIGLRIIFA

SEQ ID NO: 17350 - protein, 9 aa, Artificial Sequence
  Description of Artificial Sequence: Synthetic peptide
TLYNVVNQL

SEQ ID NO: 17351 - protein, 11 aa, Artificial Sequence
  Description of Artificial Sequence: Synthetic peptide
TQIDPDLADQL

SEQ ID NO: 17352 - protein, 9 aa, Artificial Sequence
  Description of Artificial Sequence: Synthetic peptide
EVIGNIRQA

SEQ ID NO: 17353 - protein, 9 aa, Artificial Sequence
  Description of Artificial Sequence: Synthetic peptide
NQVGSLQYL

SEQ ID NO: 17354 - protein, 9 aa, Artificial Sequence
  Description of Artificial Sequence: Synthetic peptide
QLTEVVQKI

SEQ ID NO: 17355 - protein, 9 aa, Artificial Sequence
  Description of Artificial Sequence: Synthetic peptide
RQIDNYTEV

SEQ ID NO: 17356 - protein, 9 aa, Artificial Sequence
  Description of Artificial Sequence: Synthetic peptide
VLAEAMSQV

SEQ ID NO: 17357 - protein, 9 aa, Artificial Sequence
  Description of Artificial Sequence: Synthetic peptide
AVAEGTDRI

SEQ ID NO: 17358 - protein, 9 aa, Artificial Sequence
  Description of Artificial Sequence: Synthetic peptide
TVLSIINSV

SEQ ID NO: 17359 - protein, 9 aa, Artificial Sequence
  Description of Artificial Sequence: Synthetic peptide
VVAEGTDRI

SEQ ID NO: 17360 - protein, 11 aa, Artificial Sequence
  Description of Artificial Sequence: Synthetic peptide
TQVDPDLADQL

SEQ ID NO: 17361 - protein, 11 aa, Artificial Sequence
  Description of Artificial Sequence: Synthetic peptide
TQVDPGLADQL

SEQ ID NO: 17362 - protein, 9 aa, Artificial Sequence
  Description of Artificial Sequence: Synthetic peptide
TVLEEINLL

SEQ ID NO: 17363 - protein, 9 aa, Artificial Sequence
  Description of Artificial Sequence: Synthetic peptide
AVLSIVNRV

SEQ ID NO: 17364 - protein, 9 aa, Artificial Sequence
  Description of Artificial Sequence: Synthetic peptide
ASIEEMMTA

SEQ ID NO: 17365 - protein, 9 aa, Artificial Sequence
  Description of Artificial Sequence: Synthetic peptide
KQVGTLQYL

SEQ ID NO: 17366 - protein, 10 aa, Artificial Sequence
  Description of Artificial Sequence: Synthetic peptide
SEFNLPPIVA

SEQ ID NO: 17367 - protein, 9 aa, Artificial Sequence
  Description of Artificial Sequence: Synthetic peptide
WTVNDIQKL

SEQ ID NO: 17368 - protein, 9 aa, Artificial Sequence
  Description of Artificial Sequence: Synthetic peptide
RIIEIVQRA

SEQ ID NO: 17369 - protein, 9 aa, Artificial Sequence
  Description of Artificial Sequence: Synthetic peptide
GAASITLTV

SEQ ID NO: 17370 - protein, 9 aa, Artificial Sequence
  Description of Artificial Sequence: Synthetic peptide
IVTDSQYAL

SEQ ID NO: 17371 - protein, 11 aa, Artificial Sequence
  Description of Artificial Sequence: Synthetic peptide
TQVEPGLADQL

SEQ ID NO: 17372 - protein, 10 aa, Artificial Sequence
  Description of Artificial Sequence: Synthetic peptide
YVDNGTNVTL

SEQ ID NO: 17373 - protein, 9 aa, Artificial Sequence
  Description of Artificial Sequence: Synthetic peptide
SQMTNMNTA

SEQ ID NO: 17374 - protein, 9 aa, Artificial Sequence
  Description of Artificial Sequence: Synthetic peptide
VQFNESVQI

SEQ ID NO: 17375 - protein, 9 aa, Artificial Sequence
  Description of Artificial Sequence: Synthetic peptide
FTSGAVKAA

SEQ ID NO: 17376 - protein, 9 aa, Artificial Sequence
  Description of Artificial Sequence: Synthetic peptide
QIIEQIQPA

SEQ ID NO: 17377 - protein, 9 aa, Artificial Sequence
  Description of Artificial Sequence: Synthetic peptide
SQIYPNIKV

SEQ ID NO: 17378 - protein, 9 aa, Artificial Sequence
  Description of Artificial Sequence: Synthetic peptide
VVIQDNSEI

SEQ ID NO: 17379 - protein, 9 aa, Artificial Sequence
  Description of Artificial Sequence: Synthetic peptide
SIVARTVEL

SEQ ID NO: 17380 - protein, 10 aa, Artificial Sequence
  Description of Artificial Sequence: Synthetic peptide
GEVIGNIRQA

SEQ ID NO: 17381 - protein, 9 aa, Artificial Sequence
  Description of Artificial Sequence: Synthetic peptide
LEAEPIAGA

SEQ ID NO: 17382 - protein, 9 aa, Artificial Sequence
  Description of Artificial Sequence: Synthetic peptide
RIIELVQRA

SEQ ID NO: 17383 - protein, 9 aa, Artificial Sequence
  Description of Artificial Sequence: Synthetic peptide
ASITLTVQA

SEQ ID NO: 17384 - protein, 10 aa, Artificial Sequence
  Description of Artificial Sequence: Synthetic peptide
SQYALGIIQA

SEQ ID NO: 17385 - protein, 9 aa, Artificial Sequence
  Description of Artificial Sequence: Synthetic peptide
SQSEIWDNM

SEQ ID NO: 17386 - protein, 9 aa, Artificial Sequence
  Description of Artificial Sequence: Synthetic peptide
LTFGYVADL

SEQ ID NO: 17387 - protein, 9 aa, Artificial Sequence
  Description of Artificial Sequence: Synthetic peptide
AVAEGTDGI

SEQ ID NO: 17388 - protein, 9 aa, Artificial Sequence
  Description of Artificial Sequence: Synthetic peptide
IVIRTVELL

SEQ ID NO: 17389 - protein, 9 aa, Artificial Sequence
  Description of Artificial Sequence: Synthetic peptide
QLTEAVQKI

SEQ ID NO: 17390 - protein, 11 aa, Artificial Sequence
  Description of Artificial Sequence: Synthetic peptide
VVIQDNSEIKV

SEQ ID NO: 17391 - protein, 9 aa, Artificial Sequence
  Description of Artificial Sequence: Synthetic peptide
IVARTVELL

SEQ ID NO: 17392 - protein, 9 aa, Artificial Sequence
  Description of Artificial Sequence: Synthetic peptide
YIIGIGIGA

SEQ ID NO: 17393 - protein, 9 aa, Artificial Sequence
  Description of Artificial Sequence: Synthetic peptide
SQIYPGIKV

SEQ ID NO: 17394 - protein, 9 aa, Artificial Sequence
  Description of Artificial Sequence: Synthetic peptide
SQVTNTNTA

SEQ ID NO: 17395 - protein, 9 aa, Artificial Sequence
  Description of Artificial Sequence: Synthetic peptide
ATGDIIGNI

SEQ ID NO: 17396 - protein, 9 aa, Artificial Sequence
  Description of Artificial Sequence: Synthetic peptide
NTKNIIVQL

SEQ ID NO: 17397 - protein, 9 aa, Artificial Sequence
  Description of Artificial Sequence: Synthetic peptide
TETLLVQNA

SEQ ID NO: 17398 - protein, 9 aa, Artificial Sequence
  Description of Artificial Sequence: Synthetic peptide
IEVKDTKEA

SEQ ID NO: 17399 - protein, 9 aa, Artificial Sequence
  Description of Artificial Sequence: Synthetic peptide
FTSAAVKAA

SEQ ID NO: 17400 - protein, 9 aa, Artificial Sequence
  Description of Artificial Sequence: Synthetic peptide
LETEPIVGA

SEQ ID NO: 17401 - protein, 10 aa, Artificial Sequence
  Description of Artificial Sequence: Synthetic peptide
KLIPVDPQEV

SEQ ID NO: 17402 - protein, 9 aa, Artificial Sequence
  Description of Artificial Sequence: Synthetic peptide
SLFGSDPLL

SEQ ID NO: 17403 - protein, 9 aa, Artificial Sequence
  Description of Artificial Sequence: Synthetic peptide
DIIGNIRQA

SEQ ID NO: 17404 - protein, 9 aa, Artificial Sequence
  Description of Artificial Sequence: Synthetic peptide
LVNQIIEEL

SEQ ID NO: 17405 - protein, 9 aa, Artificial Sequence
  Description of Artificial Sequence: Synthetic peptide
DIIGDIRQA

SEQ ID NO: 17406 - protein, 9 aa, Artificial Sequence
  Description of Artificial Sequence: Synthetic peptide
QLTEVVQKI

SEQ ID NO: 17407 - protein, 10 aa, Artificial Sequence
  Description of Artificial Sequence: Synthetic peptide
YVDNGTNVTL

SEQ ID NO: 17408 - protein, 9 aa, Artificial Sequence
  Description of Artificial Sequence: Synthetic peptide
IVTDSQYAL

SEQ ID NO: 17409 - protein, 9 aa, Artificial Sequence
  Description of Artificial Sequence: Synthetic peptide
RQIDNYTEV

SEQ ID NO: 17410 - protein, 9 aa, Artificial Sequence
  Description of Artificial Sequence: Synthetic peptide
TVLSIINSV

SEQ ID NO: 17411 - protein, 9 aa, Artificial Sequence
  Description of Artificial Sequence: Synthetic peptide
YSTQVDPGL

SEQ ID NO: 17412 - protein, 9 aa, Artificial Sequence
  Description of Artificial Sequence: Synthetic peptide
IQDNSEIKV

SEQ ID NO: 17413 - protein, 9 aa, Artificial Sequence
  Description of Artificial Sequence: Synthetic peptide
AVLSIVNRV

SEQ ID NO: 17414 - protein, 9 aa, Artificial Sequence
  Description of Artificial Sequence: Synthetic peptide
NQVGSLQYL

SEQ ID NO: 17415 - protein, 9 aa, Artificial Sequence
  Description of Artificial Sequence: Synthetic peptide
VLAEAMSQV

SEQ ID NO: 17416 - protein, 9 aa, Artificial Sequence
  Description of Artificial Sequence: Synthetic peptide
TVLEEINLL

SEQ ID NO: 17417 - protein, 11 aa, Artificial Sequence
  Description of Artificial Sequence: Synthetic peptide
TQIDPDLADQL

SEQ ID NO: 17418 - protein, 11 aa, Artificial Sequence
  Description of Artificial Sequence: Synthetic peptide
TQVDPGLADQL

SEQ ID NO: 17419 - protein, 11 aa, Artificial Sequence
  Description of Artificial Sequence: Synthetic peptide
VVIQDNSEIKV

SEQ ID NO: 17420 - protein, 9 aa, Artificial Sequence
  Description of Artificial Sequence: Synthetic peptide
GGIGGFIKV

SEQ ID NO: 17421 - protein, 9 aa, Artificial Sequence
  Description of Artificial Sequence: Synthetic peptide
SQIYPGIKV

SEQ ID NO: 17422 - protein, 9 aa, Artificial Sequence
  Description of Artificial Sequence: Synthetic peptide
YSTQVDPDL

SEQ ID NO: 17423 - protein, 11 aa, Artificial Sequence
  Description of Artificial Sequence: Synthetic peptide
TQVEPGLADQL

SEQ ID NO: 17424 - protein, 9 aa, Artificial Sequence
  Description of Artificial Sequence: Synthetic peptide
YSTQIDPDL

SEQ ID NO: 17425 - protein, 9 aa, Artificial Sequence
  Description of Artificial Sequence: Synthetic peptide
KQVGTLQYL

SEQ ID NO: 17426 - protein, 9 aa, Artificial Sequence
  Description of Artificial Sequence: Synthetic peptide
VQLDSPIEI

SEQ ID NO: 17427 - protein, 10 aa, Artificial Sequence
  Description of Artificial Sequence: Synthetic peptide
TVLDVGDAYF

SEQ ID NO: 17428 - protein, 9 aa, Artificial Sequence
  Description of Artificial Sequence: Synthetic peptide
SQIYPNIKV

SEQ ID NO: 17429 - protein, 9 aa, Artificial Sequence
  Description of Artificial Sequence: Synthetic peptide
EVIGNIRQA

SEQ ID NO: 17430 - protein, 9 aa, Artificial Sequence
  Description of Artificial Sequence: Synthetic peptide
TLYNVVNQL

SEQ ID NO: 17431 - protein, 11 aa, Artificial Sequence
  Description of Artificial Sequence: Synthetic peptide
TQVDPDLADQL

SEQ ID NO: 17432 - protein, 9 aa, Artificial Sequence
  Description of Artificial Sequence: Synthetic peptide
YSTQVEPGL

SEQ ID NO: 17433 - protein, 9 aa, Artificial Sequence
  Description of Artificial Sequence: Synthetic peptide
VVIQDNSEI

SEQ ID NO: 17434 - protein, 10 aa, Artificial Sequence
  Description of Artificial Sequence: Synthetic peptide
KVVKIEPLGV

SEQ ID NO: 17435 - protein, 11 aa, Artificial Sequence
  Description of Artificial Sequence: Synthetic peptide
VQDTSEALNKV

SEQ ID NO: 17436 - protein, 9 aa, Artificial Sequence
  Description of Artificial Sequence: Synthetic peptide
VQFNESVQI

SEQ ID NO: 17437 - protein, 9 aa, Artificial Sequence
  Description of Artificial Sequence: Synthetic peptide
VQLNEPVQI

SEQ ID NO: 17438 - protein, 9 aa, Artificial Sequence
  Description of Artificial Sequence: Synthetic peptide
GAASITLTV

SEQ ID NO: 17439 - protein, 9 aa, Artificial Sequence
  Description of Artificial Sequence: Synthetic peptide
QLTEAVQKI

SEQ ID NO: 17440 - protein, 8 aa, Artificial Sequence
  Description of Artificial Sequence: Synthetic peptide
GQVILVAV

SEQ ID NO: 17441 - protein, 10 aa, Artificial Sequence
  Description of Artificial Sequence: Synthetic peptide
SVLDVGDAYF

SEQ ID NO: 17442 - protein, 9 aa, Artificial Sequence
  Description of Artificial Sequence: Synthetic peptide
YQLETEPIV

SEQ ID NO: 17443 - protein, 10 aa, Artificial Sequence
  Description of Artificial Sequence: Synthetic peptide
KLVPVDPQEV

SEQ ID NO: 17444 - protein, 9 aa, Artificial Sequence
  Description of Artificial Sequence: Synthetic peptide
AVAEGTDRI

SEQ ID NO: 17445 - protein, 9 aa, Artificial Sequence
  Description of Artificial Sequence: Synthetic peptide
MIVGGIIGL

SEQ ID NO: 17446 - protein, 9 aa, Artificial Sequence
  Description of Artificial Sequence: Synthetic peptide
AALDLSHFL

SEQ ID NO: 17447 - protein, 9 aa, Artificial Sequence
  Description of Artificial Sequence: Synthetic peptide
SLFGSDPLL

SEQ ID NO: 17448 - protein, 10 aa, Artificial Sequence
  Description of Artificial Sequence: Synthetic peptide
KLIPVDPQEV

SEQ ID NO: 17449 - protein, 10 aa, Artificial Sequence
  Description of Artificial Sequence: Synthetic peptide
YVDNGTNVTL

SEQ ID NO: 17450 - protein, 10 aa, Artificial Sequence
  Description of Artificial Sequence: Synthetic peptide
FLDGIDKAQV

SEQ ID NO: 17451 - protein, 9 aa, Artificial Sequence
  Description of Artificial Sequence: Synthetic peptide
YVDRFFKTL

SEQ ID NO: 17452 - protein, 9 aa, Artificial Sequence
  Description of Artificial Sequence: Synthetic peptide
FLPLVWEDL

SEQ ID NO: 17453 - protein, 9 aa, Artificial Sequence
  Description of Artificial Sequence: Synthetic peptide
YTDEIYRLL

SEQ ID NO: 17454 - protein, 9 aa, Artificial Sequence
  Description of Artificial Sequence: Synthetic peptide
FLPVVWDDL

SEQ ID NO: 17455 - protein, 9 aa, Artificial Sequence
  Description of Artificial Sequence: Synthetic peptide
FLPIVWDDL

SEQ ID NO: 17456 - protein, 10 aa, Artificial Sequence
  Description of Artificial Sequence: Synthetic peptide
TLWQRPIVTV

SEQ ID NO: 17457 - protein, 9 aa, Artificial Sequence
  Description of Artificial Sequence: Synthetic peptide
SLDEIWDNM

SEQ ID NO: 17458 - protein, 9 aa, Artificial Sequence
  Description of Artificial Sequence: Synthetic peptide
TLYNVVNQL

SEQ ID NO: 17459 - protein, 9 aa, Artificial Sequence
  Description of Artificial Sequence: Synthetic peptide
AVLSIVNRV

SEQ ID NO: 17460 - protein, 9 aa, Artificial Sequence
  Description of Artificial Sequence: Synthetic peptide
QLTEVVQKI

SEQ ID NO: 17461 - protein, 10 aa, Artificial Sequence
  Description of Artificial Sequence: Synthetic peptide
TLWQRPLVTV

SEQ ID NO: 17462 - protein, 10 aa, Artificial Sequence
  Description of Artificial Sequence: Synthetic peptide
RLDTLEKIRL

SEQ ID NO: 17463 - protein, 9 aa, Artificial Sequence
  Description of Artificial Sequence: Synthetic peptide
ILREPVHGV

SEQ ID NO: 17464 - protein, 9 aa, Artificial Sequence
  Description of Artificial Sequence: Synthetic peptide
ILREPIHGV

SEQ ID NO: 17465 - protein, 9 aa, Artificial Sequence
  Description of Artificial Sequence: Synthetic peptide
YVDRFFRVL

SEQ ID NO: 17466 - protein, 9 aa, Artificial Sequence
  Description of Artificial Sequence: Synthetic peptide
TVLSIINSV

SEQ ID NO: 17467 - protein, 9 aa, Artificial Sequence
  Description of Artificial Sequence: Synthetic peptide
FSPEVIPMF

SEQ ID NO: 17468 - protein, 9 aa, Artificial Sequence
  Description of Artificial Sequence: Synthetic peptide
VLAEAMSQV

SEQ ID NO: 17469 - protein, 9 aa, Artificial Sequence
  Description of Artificial Sequence: Synthetic peptide
HLEGKIILV

SEQ ID NO: 17470 - protein, 9 aa, Artificial Sequence
  Description of Artificial Sequence: Synthetic peptide
GTDGIIVIV

SEQ ID NO: 17471 - protein, 9 aa, Artificial Sequence
  Description of Artificial Sequence: Synthetic peptide
YTEEIYRLL

SEQ ID NO: 17472 - protein, 9 aa, Artificial Sequence
  Description of Artificial Sequence: Synthetic peptide
HLEGKVILV

SEQ ID NO: 17473 - protein, 10 aa, Artificial Sequence
  Description of Artificial Sequence: Synthetic peptide
KLIPVDPQEV

SEQ ID NO: 17474 - protein, 9 aa, Artificial Sequence
  Description of Artificial Sequence: Synthetic peptide
IVIRTVELL

SEQ ID NO: 17475 - protein, 9 aa, Artificial Sequence
  Description of Artificial Sequence: Synthetic peptide
KQVGTLQYL

SEQ ID NO: 17476 - protein, 9 aa, Artificial Sequence
  Description of Artificial Sequence: Synthetic peptide
IVARTVELL

SEQ ID NO: 17477 - protein, 10 aa, Artificial Sequence
  Description of Artificial Sequence: Synthetic peptide
KVVKIEPLGV

SEQ ID NO: 17478 - protein, 9 aa, Artificial Sequence
  Description of Artificial Sequence: Synthetic peptide
KQISQIQKF

SEQ ID NO: 17479 - protein, 9 aa, Artificial Sequence
  Description of Artificial Sequence: Synthetic peptide
IVVRTVELL

SEQ ID NO: 17480 - protein, 9 aa, Artificial Sequence
  Description of Artificial Sequence: Synthetic peptide
EVIGNIRQA

SEQ ID NO: 17481 - protein, 9 aa, Artificial Sequence
  Description of Artificial Sequence: Synthetic peptide
AIIRTLQQL

SEQ ID NO: 17482 - protein, 9 aa, Artificial Sequence
  Description of Artificial Sequence: Synthetic peptide
KQISNIQKF

SEQ ID NO: 17483 - protein, 9 aa, Artificial Sequence
  Description of Artificial Sequence: Synthetic peptide
KTKPPLPSV

SEQ ID NO: 17484 - protein, 9 aa, Artificial Sequence
  Description of Artificial Sequence: Synthetic peptide
RIIEIVQRA

SEQ ID NO: 17485 - protein, 9 aa, Artificial Sequence
  Description of Artificial Sequence: Synthetic peptide
KVVSLTETT

SEQ ID NO: 17486 - protein, 9 aa, Artificial Sequence
  Description of Artificial Sequence: Synthetic peptide
RQIDNYTEV

SEQ ID NO: 17487 - protein, 9 aa, Artificial Sequence
  Description of Artificial Sequence: Synthetic peptide
WTVNDIQKL

SEQ ID NO: 17488 - protein, 10 aa, Artificial Sequence
  Description of Artificial Sequence: Synthetic peptide
KTLQQIATQL

SEQ ID NO: 17489 - protein, 10 aa, Artificial Sequence
  Description of Artificial Sequence: Synthetic peptide
KLIPVDPQEV

SEQ ID NO: 17490 - protein, 9 aa, Artificial Sequence
  Description of Artificial Sequence: Synthetic peptide
QLTEVVQKI

SEQ ID NO: 17491 - protein, 9 aa, Artificial Sequence
  Description of Artificial Sequence: Synthetic peptide
ALTRILQQL

SEQ ID NO: 17492 - protein, 9 aa, Artificial Sequence
  Description of Artificial Sequence: Synthetic peptide
NQVGSLQYL

SEQ ID NO: 17493 - protein, 9 aa, Artificial Sequence
  Description of Artificial Sequence: Synthetic peptide
AVLSIVNRV

SEQ ID NO: 17494 - protein, 9 aa, Artificial Sequence
  Description of Artificial Sequence: Synthetic peptide
RIIELVQRA

SEQ ID NO: 17495 - protein, 9 aa, Artificial Sequence
  Description of Artificial Sequence: Synthetic peptide
TVLSIINSV

SEQ ID NO: 17496 - protein, 9 aa, Artificial Sequence
  Description of Artificial Sequence: Synthetic peptide
KIKPPLPSV

SEQ ID NO: 17497 - protein, 9 aa, Artificial Sequence
  Description of Artificial Sequence: Synthetic peptide
RTKPPLPSV

SEQ ID NO: 17498 - protein, 9 aa, Artificial Sequence
  Description of Artificial Sequence: Synthetic peptide
YIIGIGIGA

SEQ ID NO: 17499 - protein, 9 aa, Artificial Sequence
  Description of Artificial Sequence: Synthetic peptide
KVVALTETT

SEQ ID NO: 17500 - protein, 9 aa, Artificial Sequence
  Description of Artificial Sequence: Synthetic peptide
VLAEAMSQV

SEQ ID NO: 17501 - protein, 9 aa, Artificial Sequence
  Description of Artificial Sequence: Synthetic peptide
FTSGAVKAA

SEQ ID NO: 17502 - protein, 10 aa, Artificial Sequence
  Description of Artificial Sequence: Synthetic peptide
GEVIGNIRQA

SEQ ID NO: 17503 - protein, 10 aa, Artificial Sequence
  Description of Artificial Sequence: Synthetic peptide
RVLAEAMSQV

SEQ ID NO: 17504 - protein, 9 aa, Artificial Sequence
  Description of Artificial Sequence: Synthetic peptide
ALIRTLQQL

SEQ ID NO: 17505 - protein, 9 aa, Artificial Sequence
  Description of Artificial Sequence: Synthetic peptide
TLYNVVNQL

SEQ ID NO: 17506 - protein, 9 aa, Artificial Sequence
  Description of Artificial Sequence: Synthetic peptide
LETEPIVGA

SEQ ID NO: 17507 - protein, 9 aa, Artificial Sequence
  Description of Artificial Sequence: Synthetic peptide
IEVKDTKEA

SEQ ID NO: 17508 - protein, 10 aa, Artificial Sequence
  Description of Artificial Sequence: Synthetic peptide
KTLYNVVNQL

SEQ ID NO: 17509 - protein, 9 aa, Artificial Sequence
  Description of Artificial Sequence: Synthetic peptide
LTFGYVADL

SEQ ID NO: 17510 - protein, 10 aa, Artificial Sequence
  Description of Artificial Sequence: Synthetic peptide
KTGTEDLQSL

SEQ ID NO: 17511 - protein, 11 aa, Artificial Sequence
  Description of Artificial Sequence: Synthetic peptide
SVLSGGRLDTL

SEQ ID NO: 17512 - protein, 9 aa, Artificial Sequence
  Description of Artificial Sequence: Synthetic peptide
VVKIEPLGV

SEQ ID NO: 17513 - protein, 9 aa, Artificial Sequence
  Description of Artificial Sequence: Synthetic peptide
QIYPNIKVK

SEQ ID NO: 17514 - protein, 9 aa, Artificial Sequence
  Description of Artificial Sequence: Synthetic peptide
ASAAIMMQK

SEQ ID NO: 17515 - protein, 9 aa, Artificial Sequence
  Description of Artificial Sequence: Synthetic peptide
SVNATNVTK

SEQ ID NO: 17516 - protein, 9 aa, Artificial Sequence
  Description of Artificial Sequence: Synthetic peptide
ALTALVTPK

SEQ ID NO: 17517 - protein, 10 aa, Artificial Sequence
  Description of Artificial Sequence: Synthetic peptide
ALTDVVPLTK

SEQ ID NO: 17518 - protein, 9 aa, Artificial Sequence
  Description of Artificial Sequence: Synthetic peptide
AIFQSSMTK

SEQ ID NO: 17519 - protein, 9 aa, Artificial Sequence
  Description of Artificial Sequence: Synthetic peptide
AIFQNSMTK

SEQ ID NO: 17520 - protein, 11 aa, Artificial Sequence
  Description of Artificial Sequence: Synthetic peptide
ALNKVKEIQNK

SEQ ID NO: 17521 - protein, 10 aa, Artificial Sequence
  Description of Artificial Sequence: Synthetic peptide
NTNTAIMMQK

SEQ ID NO: 17522 - protein, 10 aa, Artificial Sequence
  Description of Artificial Sequence: Synthetic peptide
GTNFTSTAVK

SEQ ID NO: 17523 - protein, 9 aa, Artificial Sequence
  Description of Artificial Sequence: Synthetic peptide
SVIKQACPK

SEQ ID NO: 17524 - protein, 10 aa, Artificial Sequence
  Description of Artificial Sequence: Synthetic peptide
ALTDIIPLTK

SEQ ID NO: 17525 - protein, 9 aa, Artificial Sequence
  Description of Artificial Sequence: Synthetic peptide
ALTALISPK

SEQ ID NO: 17526 - protein, 9 aa, Artificial Sequence
  Description of Artificial Sequence: Synthetic peptide
ALTALVAPK

SEQ ID NO: 17527 - protein, 9 aa, Artificial Sequence
  Description of Artificial Sequence: Synthetic peptide
ANAAIMMQK

SEQ ID NO: 17528 - protein, 10 aa, Artificial Sequence
  Description of Artificial Sequence: Synthetic peptide
NMNTAIMVQK

SEQ ID NO: 17529 - protein, 10 aa, Artificial Sequence
  Description of Artificial Sequence: Synthetic peptide
KTKPPLPSVK

SEQ ID NO: 17530 - protein, 9 aa, Artificial Sequence
  Description of Artificial Sequence: Synthetic peptide
QIYPGIKVR

SEQ ID NO: 17531 - protein, 10 aa, Artificial Sequence
  Description of Artificial Sequence: Synthetic peptide
QVAIEIFGKK

SEQ ID NO: 17532 - protein, 9 aa, Artificial Sequence
  Description of Artificial Sequence: Synthetic peptide
SISKQPLSR

SEQ ID NO: 17533 - protein, 10 aa, Artificial Sequence
  Description of Artificial Sequence: Synthetic peptide
TVYYGVPVWK

SEQ ID NO: 17534 - protein, 11 aa, Artificial Sequence
  Description of Artificial Sequence: Synthetic peptide
TVNDIQKLVGK

SEQ ID NO: 17535 - protein, 10 aa, Artificial Sequence
  Description of Artificial Sequence: Synthetic peptide
TLIPKQPLSR

SEQ ID NO: 17536 - protein, 11 aa, Artificial Sequence
  Description of Artificial Sequence: Synthetic peptide
KALTDVVPLTK

SEQ ID NO: 17537 - protein, 11 aa, Artificial Sequence
  Description of Artificial Sequence: Synthetic peptide
RTKPPLPSVRK

SEQ ID NO: 17538 - protein, 11 aa, Artificial Sequence
  Description of Artificial Sequence: Synthetic peptide
SLQDHQTLIPK

SEQ ID NO: 17539 - protein, 11 aa, Artificial Sequence
  Description of Artificial Sequence: Synthetic peptide
KTKPPLPSVKK

SEQ ID NO: 17540 - protein, 8 aa, Artificial Sequence
  Description of Artificial Sequence: Synthetic peptide
SAAIMMQK

SEQ ID NO: 17541 - protein, 10 aa, Artificial Sequence
  Description of Artificial Sequence: Synthetic peptide
SLFGNDPLSQ

SEQ ID NO: 17542 - protein, 10 aa, Artificial Sequence
  Description of Artificial Sequence: Synthetic peptide
ALTEIVPLTK

SEQ ID NO: 17543 - protein, 9 aa, Artificial Sequence
  Description of Artificial Sequence: Synthetic peptide
SVITQACPK

SEQ ID NO: 17544 - protein, 9 aa, Artificial Sequence
  Description of Artificial Sequence: Synthetic peptide
SVNATNVTK

SEQ ID NO: 17545 - protein, 11 aa, Artificial Sequence
  Description of Artificial Sequence: Synthetic peptide
TVNDIQKLVGK

SEQ ID NO: 17546 - protein, 11 aa, Artificial Sequence
  Description of Artificial Sequence: Synthetic peptide
GLQDNQDPIPK

SEQ ID NO: 17547 - protein, 9 aa, Artificial Sequence
  Description of Artificial Sequence: Synthetic peptide
QIYPNIKVK

SEQ ID NO: 17548 - protein, 9 aa, Artificial Sequence
  Description of Artificial Sequence: Synthetic peptide
ASAAIMMQK

SEQ ID NO: 17549 - protein, 9 aa, Artificial Sequence
  Description of Artificial Sequence: Synthetic peptide
ALTALVTPK

SEQ ID NO: 17550 - protein, 11 aa, Artificial Sequence
  Description of Artificial Sequence: Synthetic peptide
ALNKVKEIQNK

SEQ ID NO: 17551 - protein, 11 aa, Artificial Sequence
  Description of Artificial Sequence: Synthetic peptide
SLQDHQNSISK

SEQ ID NO: 17552 - protein, 10 aa, Artificial Sequence
  Description of Artificial Sequence: Synthetic peptide
NTNTAIMMQK

SEQ ID NO: 17553 - protein, 10 aa, Artificial Sequence
  Description of Artificial Sequence: Synthetic peptide
GTNFTSTAVK

SEQ ID NO: 17554 - protein, 11 aa, Artificial Sequence
  Description of Artificial Sequence: Synthetic peptide
VVALTETTNQK

SEQ ID NO: 17555 - protein, 10 aa, Artificial Sequence
  Description of Artificial Sequence: Synthetic peptide
ALTDVVPLTK

SEQ ID NO: 17556 - protein, 11 aa, Artificial Sequence
  Description of Artificial Sequence: Synthetic peptide
KIEPLGIAPTK

SEQ ID NO: 17557 - protein, 10 aa, Artificial Sequence
  Description of Artificial Sequence: Synthetic peptide
TVQPVKLPEK

SEQ ID NO: 17558 - protein, 10 aa, Artificial Sequence
  Description of Artificial Sequence: Synthetic peptide
NMNTAIMVQK

SEQ ID NO: 17559 - protein, 10 aa, Artificial Sequence
  Description of Artificial Sequence: Synthetic peptide
ALTDIIPLTK

SEQ ID NO: 17560 - protein, 9 aa, Artificial Sequence
  Description of Artificial Sequence: Synthetic peptide
AIFQNSMTK

SEQ ID NO: 17561 - protein, 9 aa, Artificial Sequence
  Description of Artificial Sequence: Synthetic peptide
AIFQSSMTK

SEQ ID NO: 17562 - protein, 9 aa, Artificial Sequence
  Description of Artificial Sequence: Synthetic peptide
GLDGLIYSK

SEQ ID NO: 17563 - protein, 10 aa, Artificial Sequence
  Description of Artificial Sequence: Synthetic peptide
ILGQLQPALK

SEQ ID NO: 17564 - protein, 9 aa, Artificial Sequence
  Description of Artificial Sequence: Synthetic peptide
SVIKQACPK

SEQ ID NO: 17565 - protein, 9 aa, Artificial Sequence
  Description of Artificial Sequence: Synthetic peptide
ALTALVAPK

SEQ ID NO: 17566 - protein, 10 aa, Artificial Sequence
  Description of Artificial Sequence: Synthetic peptide
TVQTVKLPEK

SEQ ID NO: 17567 - protein, 10 aa, Artificial Sequence
  Description of Artificial Sequence: Synthetic peptide
GSNFTSAAVK

SEQ ID NO: 17568 - protein, 11 aa, Artificial Sequence
  Description of Artificial Sequence: Synthetic peptide
SLQDHQTLIPK

SEQ ID NO: 17569 - protein, 11 aa, Artificial Sequence
  Description of Artificial Sequence: Synthetic peptide
QIEPLGIAPTK

SEQ ID NO: 17570 - protein, 10 aa, Artificial Sequence
  Description of Artificial Sequence: Synthetic peptide
GSNFTSGAVK

SEQ ID NO: 17571 - protein, 11 aa, Artificial Sequence
  Description of Artificial Sequence: Synthetic peptide
VVSLTETTNQK

SEQ ID NO: 17572 - protein, 9 aa, Artificial Sequence
  Description of Artificial Sequence: Synthetic peptide
ALTALISPK

SEQ ID NO: 17573 - protein, 11 aa, Artificial Sequence
  Description of Artificial Sequence: Synthetic peptide
IVSLTETTNQK

SEQ ID NO: 17574 - protein, 11 aa, Artificial Sequence
  Description of Artificial Sequence: Synthetic peptide
EVQDTSEALNK

SEQ ID NO: 17575 - protein, 9 aa, Artificial Sequence
  Description of Artificial Sequence: Synthetic peptide
SVITQACPK

SEQ ID NO: 17576 - protein, 9 aa, Artificial Sequence
  Description of Artificial Sequence: Synthetic peptide
APAGFAILK

SEQ ID NO: 17577 - protein, 11 aa, Artificial Sequence
  Description of Artificial Sequence: Synthetic peptide
TLQQIATQLSK

SEQ ID NO: 17578 - protein, 11 aa, Artificial Sequence
  Description of Artificial Sequence: Synthetic peptide
ATDIPTKELQK

SEQ ID NO: 17579 - protein, 9 aa, Artificial Sequence
  Description of Artificial Sequence: Synthetic peptide
KTQQATANK

SEQ ID NO: 17580 - protein, 10 aa, Artificial Sequence
  Description of Artificial Sequence: Synthetic peptide
SSVNATNVTK

SEQ ID NO: 17581 - protein, 9 aa, Artificial Sequence
  Description of Artificial Sequence: Synthetic peptide
KQLTEVVQK

SEQ ID NO: 17582 - protein, 11 aa, Artificial Sequence
  Description of Artificial Sequence: Synthetic peptide
QSQGVVESMNK

SEQ ID NO: 17583 - protein, 10 aa, Artificial Sequence
  Description of Artificial Sequence: Synthetic peptide
ALTEIVPLTK

SEQ ID NO: 17584 - protein, 9 aa, Artificial Sequence
  Description of Artificial Sequence: Synthetic peptide
QVAIEIFGK

SEQ ID NO: 17585 - protein, 11 aa, Artificial Sequence
  Description of Artificial Sequence: Synthetic peptide
SVQDHQNHIPK

SEQ ID NO: 17586 - protein, 10 aa, Artificial Sequence
  Description of Artificial Sequence: Synthetic peptide
KIEEIQNKNK

SEQ ID NO: 17587 - protein, 10 aa, Artificial Sequence
  Description of Artificial Sequence: Synthetic peptide
HTNYTSNDTK

SEQ ID NO: 17588 - protein, 9 aa, Artificial Sequence
  Description of Artificial Sequence: Synthetic peptide
ALTETTNQK

SEQ ID NO: 17589 - protein, 11 aa, Artificial Sequence
  Description of Artificial Sequence: Synthetic peptide
RTQQAPAAADK

SEQ ID NO: 17590 - protein, 9 aa, Artificial Sequence
  Description of Artificial Sequence: Synthetic peptide
IIATDIPTK

SEQ ID NO: 17591 - protein, 9 aa, Artificial Sequence
  Description of Artificial Sequence: Synthetic peptide
IIATDIQTK

SEQ ID NO: 17592 - protein, 9 aa, Artificial Sequence
  Description of Artificial Sequence: Synthetic peptide
GLEGLVYSK

SEQ ID NO: 17593 - protein, 11 aa, Artificial Sequence
  Description of Artificial Sequence: Synthetic peptide
KALTDVVPLTK

SEQ ID NO: 17594 - protein, 10 aa, Artificial Sequence
  Description of Artificial Sequence: Synthetic peptide
ATESIVIWGK

SEQ ID NO: 17595 - protein, 9 aa, Artificial Sequence
  Description of Artificial Sequence: Synthetic peptide
QVAIEICGK

SEQ ID NO: 17596 - protein, 9 aa, Artificial Sequence
  Description of Artificial Sequence: Synthetic peptide
KLVSSGVRK

SEQ ID NO: 17597 - protein, 9 aa, Artificial Sequence
  Description of Artificial Sequence: Synthetic peptide
SNFTSGAVK

SEQ ID NO: 17598 - protein, 9 aa, Artificial Sequence
  Description of Artificial Sequence: Synthetic peptide
KQLTEAVQK

SEQ ID NO: 17599 - protein, 11 aa, Artificial Sequence
  Description of Artificial Sequence: Synthetic peptide
ATDIQTKELQK

SEQ ID NO: 17600 - protein, 10 aa, Artificial Sequence
  Description of Artificial Sequence: Synthetic peptide
SILDIKQGPK

SEQ ID NO: 17601 - protein, 8 aa, Artificial Sequence
  Description of Artificial Sequence: Synthetic peptide
SAAIMMQK

SEQ ID NO: 17602 - protein, 10 aa, Artificial Sequence
  Description of Artificial Sequence: Synthetic peptide
VVESMNKELK

SEQ ID NO: 17603 - protein, 10 aa, Artificial Sequence
  Description of Artificial Sequence: Synthetic peptide
QVAIEIFGKK

SEQ ID NO: 17604 - protein, 9 aa, Artificial Sequence
  Description of Artificial Sequence: Synthetic peptide
SVNATNVTK

SEQ ID NO: 17605 - protein, 9 aa, Artificial Sequence
  Description of Artificial Sequence: Synthetic peptide
ASAAIMMQK

SEQ ID NO: 17606 - protein, 9 aa, Artificial Sequence
  Description of Artificial Sequence: Synthetic peptide
QIYPNIKVK

SEQ ID NO: 17607 - protein, 10 aa, Artificial Sequence
  Description of Artificial Sequence: Synthetic peptide
SSVNATNVTK

SEQ ID NO: 17608 - protein, 11 aa, Artificial Sequence
  Description of Artificial Sequence: Synthetic peptide
ATDIPTKELQK

SEQ ID NO: 17609 - protein, 9 aa, Artificial Sequence
  Description of Artificial Sequence: Synthetic peptide
SVITQACPK

SEQ ID NO: 17610 - protein, 10 aa, Artificial Sequence
  Description of Artificial Sequence: Synthetic peptide
NTNTAIMMQK

SEQ ID NO: 17611 - protein, 9 aa, Artificial Sequence
  Description of Artificial Sequence: Synthetic peptide
SVIKQACPK

SEQ ID NO: 17612 - protein, 9 aa, Artificial Sequence
  Description of Artificial Sequence: Synthetic peptide
STPIFAIKK

SEQ ID NO: 17613 - protein, 11 aa, Artificial Sequence
  Description of Artificial Sequence: Synthetic peptide
TVNDIQKLVGK

SEQ ID NO: 17614 - protein, 10 aa, Artificial Sequence
  Description of Artificial Sequence: Synthetic peptide
TVQTVKLPEK

SEQ ID NO: 17615 - protein, 10 aa, Artificial Sequence
  Description of Artificial Sequence: Synthetic peptide
GTNFTSTAVK

SEQ ID NO: 17616 - protein, 9 aa, Artificial Sequence
  Description of Artificial Sequence: Synthetic peptide
APAGFAILK

SEQ ID NO: 17617 - protein, 10 aa, Artificial Sequence
  Description of Artificial Sequence: Synthetic peptide
GSNFTSGAVK

SEQ ID NO: 17618 - protein, 10 aa, Artificial Sequence
  Description of Artificial Sequence: Synthetic peptide
TVQPVKLPEK

SEQ ID NO: 17619 - protein, 11 aa, Artificial Sequence
  Description of Artificial Sequence: Synthetic peptide
SVQDHQNHIPK

SEQ ID NO: 17620 - protein, 11 aa, Artificial Sequence
  Description of Artificial Sequence: Synthetic peptide
GTDGIIVIVQR

SEQ ID NO: 17621 - protein, 10 aa, Artificial Sequence
  Description of Artificial Sequence: Synthetic peptide
GSNFTSAAVK

SEQ ID NO: 17622 - protein, 8 aa, Artificial Sequence
  Description of Artificial Sequence: Synthetic peptide
SAAIMMQK

SEQ ID NO: 17623 - protein, 11 aa, Artificial Sequence
  Description of Artificial Sequence: Synthetic peptide
VVALTETTNQK

SEQ ID NO: 17624 - protein, 11 aa, Artificial Sequence
  Description of Artificial Sequence: Synthetic peptide
ATDIQTKELQK

SEQ ID NO: 17625 - protein, 10 aa, Artificial Sequence
  Description of Artificial Sequence: Synthetic peptide
GGLDGLIYSK

SEQ ID NO: 17626 - protein, 9 aa, Artificial Sequence
  Description of Artificial Sequence: Synthetic peptide
AIFQNSMTK

SEQ ID NO: 17627 - protein, 9 aa, Artificial Sequence
  Description of Artificial Sequence: Synthetic peptide
AIFQSSMTK

SEQ ID NO: 17628 - protein, 9 aa, Artificial Sequence
  Description of Artificial Sequence: Synthetic peptide
STILGTGTK

SEQ ID NO: 17629 - protein, 10 aa, Artificial Sequence
  Description of Artificial Sequence: Synthetic peptide
ALTDVVPLTK

SEQ ID NO: 17630 - protein, 9 aa, Artificial Sequence
  Description of Artificial Sequence: Synthetic peptide
ALTALVTPK

SEQ ID NO: 17631 - protein, 10 aa, Artificial Sequence
  Description of Artificial Sequence: Synthetic peptide
ATGDIIGNIR

SEQ ID NO: 17632 - protein, 10 aa, Artificial Sequence
  Description of Artificial Sequence: Synthetic peptide
ATESIVIWGK

SEQ ID NO: 17633 - protein, 9 aa, Artificial Sequence
  Description of Artificial Sequence: Synthetic peptide
LTDIIPLTK

SEQ ID NO: 17634 - protein, 9 aa, Artificial Sequence
  Description of Artificial Sequence: Synthetic peptide
ALTALISPK

SEQ ID NO: 17635 - protein, 9 aa, Artificial Sequence
  Description of Artificial Sequence: Synthetic peptide
LTDVVPLTK

SEQ ID NO: 17636 - protein, 9 aa, Artificial Sequence
  Description of Artificial Sequence: Synthetic peptide
KQLTEVVQK

SEQ ID NO: 17637 - protein, 11 aa, Artificial Sequence
  Description of Artificial Sequence: Synthetic peptide
GLQDNQDPIPK

SEQ ID NO: 17638 - protein, 11 aa, Artificial Sequence
  Description of Artificial Sequence: Synthetic peptide
VVSLTETTNQK

SEQ ID NO: 17639 - protein, 11 aa, Artificial Sequence
  Description of Artificial Sequence: Synthetic peptide
EVQDTSEALNK

SEQ ID NO: 17640 - protein, 10 aa, Artificial Sequence
  Description of Artificial Sequence: Synthetic peptide
AALDLSHFLK

SEQ ID NO: 17641 - protein, 10 aa, Artificial Sequence
  Description of Artificial Sequence: Synthetic peptide
GALDLSHFLK

SEQ ID NO: 17642 - protein, 8 aa, Artificial Sequence
  Description of Artificial Sequence: Synthetic peptide
TDVVPLTK

SEQ ID NO: 17643 - protein, 10 aa, Artificial Sequence
  Description of Artificial Sequence: Synthetic peptide
ALTDIIPLTK

SEQ ID NO: 17644 - protein, 11 aa, Artificial Sequence
  Description of Artificial Sequence: Synthetic peptide
GVVESMNKELK

SEQ ID NO: 17645 - protein, 9 aa, Artificial Sequence
  Description of Artificial Sequence: Synthetic peptide
ANAAIMMQK

SEQ ID NO: 17646 - protein, 10 aa, Artificial Sequence
  Description of Artificial Sequence: Synthetic peptide
GAFDLSHFLK

SEQ ID NO: 17647 - protein, 9 aa, Artificial Sequence
  Description of Artificial Sequence: Synthetic peptide
GLDGLIYSK

SEQ ID NO: 17648 - protein, 9 aa, Artificial Sequence
  Description of Artificial Sequence: Synthetic peptide
ALTALVAPK

SEQ ID NO: 17649 - protein, 11 aa, Artificial Sequence
  Description of Artificial Sequence: Synthetic peptide
ATGDIIGDIRR

SEQ ID NO: 17650 - protein, 9 aa, Artificial Sequence
  Description of Artificial Sequence: Synthetic peptide
QIYPGIKVR

SEQ ID NO: 17651 - protein, 10 aa, Artificial Sequence
  Description of Artificial Sequence: Synthetic peptide
SILDIKQGPK

SEQ ID NO: 17652 - protein, 9 aa, Artificial Sequence
  Description of Artificial Sequence: Synthetic peptide
VAIEIFGKK

SEQ ID NO: 17653 - protein, 11 aa, Artificial Sequence
  Description of Artificial Sequence: Synthetic peptide
RYVDNGTNVTL

SEQ ID NO: 17654 - protein, 9 aa, Artificial Sequence
  Description of Artificial Sequence: Synthetic peptide
NYTEVIYRL

SEQ ID NO: 17655 - protein, 9 aa, Artificial Sequence
  Description of Artificial Sequence: Synthetic peptide
NYTDEIYRL

SEQ ID NO: 17656 - protein, 9 aa, Artificial Sequence
  Description of Artificial Sequence: Synthetic peptide
YFVNRTLIF

SEQ ID NO: 17657 - protein, 9 aa, Artificial Sequence
  Description of Artificial Sequence: Synthetic peptide
NYTEEIYRL

SEQ ID NO: 17658 - protein, 9 aa, Artificial Sequence
  Description of Artificial Sequence: Synthetic peptide
IYQEPFKNL

SEQ ID NO: 17659 - protein, 9 aa, Artificial Sequence
  Description of Artificial Sequence: Synthetic peptide
VLENVTETF

SEQ ID NO: 17660 - protein, 9 aa, Artificial Sequence
  Description of Artificial Sequence: Synthetic peptide
VMENVTESF

SEQ ID NO: 17661 - protein, 9 aa, Artificial Sequence
  Description of Artificial Sequence: Synthetic peptide
NITGLILTF

SEQ ID NO: 17662 - protein, 9 aa, Artificial Sequence
  Description of Artificial Sequence: Synthetic peptide
VLENVTENF

SEQ ID NO: 17663 - protein, 9 aa, Artificial Sequence
  Description of Artificial Sequence: Synthetic peptide
RYLKDQQLL

SEQ ID NO: 17664 - protein, 9 aa, Artificial Sequence
  Description of Artificial Sequence: Synthetic peptide
KQISQIQKF

SEQ ID NO: 17665 - protein, 9 aa, Artificial Sequence
  Description of Artificial Sequence: Synthetic peptide
RYLRDQQLL

SEQ ID NO: 17666 - protein, 9 aa, Artificial Sequence
  Description of Artificial Sequence: Synthetic peptide
KQISNIQKF

SEQ ID NO: 17667 - protein, 8 aa, Artificial Sequence
  Description of Artificial Sequence: Synthetic peptide
IEITSHTF

SEQ ID NO: 17668 - protein, 9 aa, Artificial Sequence
  Description of Artificial Sequence: Synthetic peptide
NYTEVIYRL

SEQ ID NO: 17669 - protein, 11 aa, Artificial Sequence
  Description of Artificial Sequence: Synthetic peptide
RYVDNGTNVTL

SEQ ID NO: 17670 - protein, 9 aa, Artificial Sequence
  Description of Artificial Sequence: Synthetic peptide
IYQEPFKNL

SEQ ID NO: 17671 - protein, 9 aa, Artificial Sequence
  Description of Artificial Sequence: Synthetic peptide
NYTEEIYRL

SEQ ID NO: 17672 - protein, 9 aa, Artificial Sequence
  Description of Artificial Sequence: Synthetic peptide
RYLKDQQLL

SEQ ID NO: 17673 - protein, 9 aa, Artificial Sequence
  Description of Artificial Sequence: Synthetic peptide
IYSAAGNLW

SEQ ID NO: 17674 - protein, 9 aa, Artificial Sequence
  Description of Artificial Sequence: Synthetic peptide
YFVNRTLIF

SEQ ID NO: 17675 - protein, 9 aa, Artificial Sequence
  Description of Artificial Sequence: Synthetic peptide
YYDPSKELI

SEQ ID NO: 17676 - protein, 9 aa, Artificial Sequence
  Description of Artificial Sequence: Synthetic peptide
NYTDEIYRL

SEQ ID NO: 17677 - protein, 9 aa, Artificial Sequence
  Description of Artificial Sequence: Synthetic peptide
IYNTYGDTW

SEQ ID NO: 17678 - protein, 9 aa, Artificial Sequence
  Description of Artificial Sequence: Synthetic peptide
RYLRDQQLL

SEQ ID NO: 17679 - protein, 9 aa, Artificial Sequence
  Description of Artificial Sequence: Synthetic peptide
YYDPSKDLI

SEQ ID NO: 17680 - protein, 10 aa, Artificial Sequence
  Description of Artificial Sequence: Synthetic peptide
DTINEEAAEW

SEQ ID NO: 17681 - protein, 9 aa, Artificial Sequence
  Description of Artificial Sequence: Synthetic peptide
EVIPMFSAL

SEQ ID NO: 17682 - protein, 9 aa, Artificial Sequence
  Description of Artificial Sequence: Synthetic peptide
ETQRNYPSL

SEQ ID NO: 17683 - protein, 9 aa, Artificial Sequence
  Description of Artificial Sequence: Synthetic peptide
EVIGNIRQA

SEQ ID NO: 17684 - protein, 10 aa, Artificial Sequence
  Description of Artificial Sequence: Synthetic peptide
MVMENVTESF

SEQ ID NO: 17685 - protein, 9 aa, Artificial Sequence
  Description of Artificial Sequence: Synthetic peptide
DIAGTTSTL

SEQ ID NO: 17686 - protein, 10 aa, Artificial Sequence
  Description of Artificial Sequence: Synthetic peptide
NTSGLFNSSW

SEQ ID NO: 17687 - protein, 9 aa, Artificial Sequence
  Description of Artificial Sequence: Synthetic peptide
NVTENFNMW

SEQ ID NO: 17688 - protein, 9 aa, Artificial Sequence
  Description of Artificial Sequence: Synthetic peptide
EVIYRLLEL

SEQ ID NO: 17689 - protein, 9 aa, Artificial Sequence
  Description of Artificial Sequence: Synthetic peptide
EAMSQMTNM

SEQ ID NO: 17690 - protein, 9 aa, Artificial Sequence
  Description of Artificial Sequence: Synthetic peptide
ETKIGRAGY

SEQ ID NO: 17691 - protein, 9 aa, Artificial Sequence
  Description of Artificial Sequence: Synthetic peptide
SVLDVGGAY

SEQ ID NO: 17692 - protein, 10 aa, Artificial Sequence
  Description of Artificial Sequence: Synthetic peptide
TVKLPEKDSW

SEQ ID NO: 17693 - protein, 10 aa, Artificial Sequence
  Description of Artificial Sequence: Synthetic peptide
EVNIVTDSQY

SEQ ID NO: 17694 - protein, 9 aa, Artificial Sequence
  Description of Artificial Sequence: Synthetic peptide
EVIGNIRQA

SEQ ID NO: 17695 - protein, 10 aa, Artificial Sequence
  Description of Artificial Sequence: Synthetic peptide
EVNIVTDSQY

SEQ ID NO: 17696 - protein, 9 aa, Artificial Sequence
  Description of Artificial Sequence: Synthetic peptide
ETKIGKAGY

SEQ ID NO: 17697 - protein, 9 aa, Artificial Sequence
  Description of Artificial Sequence: Synthetic peptide
EAMSQMTNM

SEQ ID NO: 17698 - protein, 9 aa, Artificial Sequence
  Description of Artificial Sequence: Synthetic peptide
EVIPMFSAL

SEQ ID NO: 17699 - protein, 9 aa, Artificial Sequence
  Description of Artificial Sequence: Synthetic peptide
ETKMGKAGY

SEQ ID NO: 17700 - protein, 9 aa, Artificial Sequence
  Description of Artificial Sequence: Synthetic peptide
ETKIGRAGY

SEQ ID NO: 17701 - protein, 9 aa, Artificial Sequence
  Description of Artificial Sequence: Synthetic peptide
ETKLGKAGY

SEQ ID NO: 17702 - protein, 9 aa, Artificial Sequence
  Description of Artificial Sequence: Synthetic peptide
ETPGIRYQY

SEQ ID NO: 17703 - protein, 10 aa, Artificial Sequence
  Description of Artificial Sequence: Synthetic peptide
EVIPAETGKE

SEQ ID NO: 17704 - protein, 9 aa, Artificial Sequence
  Description of Artificial Sequence: Synthetic peptide
DIIGNIRQA

SEQ ID NO: 17705 - protein, 9 aa, Artificial Sequence
  Description of Artificial Sequence: Synthetic peptide
QIATQLSKY

SEQ ID NO: 17706 - protein, 10 aa, Artificial Sequence
  Description of Artificial Sequence: Synthetic peptide
EVIPAETGQE

SEQ ID NO: 17707 - protein, 10 aa, Artificial Sequence
  Description of Artificial Sequence: Synthetic peptide
DIIGDIRRAY

SEQ ID NO: 17708 - protein, 9 aa, Artificial Sequence
  Description of Artificial Sequence: Synthetic peptide
SVLDVGGAY

SEQ ID NO: 17709 - protein, 9 aa, Artificial Sequence
  Description of Artificial Sequence: Synthetic peptide
DIIGDIRQA

SEQ ID NO: 17710 - protein, 10 aa, Artificial Sequence
  Description of Artificial Sequence: Synthetic peptide
EPIEGAETYY

SEQ ID NO: 17711 - protein, 9 aa, Artificial Sequence
  Description of Artificial Sequence: Synthetic peptide
EVIPAETGQ

SEQ ID NO: 17712 - protein, 9 aa, Artificial Sequence
  Description of Artificial Sequence: Synthetic peptide
NTKNIIVQF

SEQ ID NO: 17713 - protein, 10 aa, Artificial Sequence
  Description of Artificial Sequence: Synthetic peptide
EPIAGAETYY

SEQ ID NO: 17714 - protein, 9 aa, Artificial Sequence
  Description of Artificial Sequence: Synthetic peptide
NITGLILTY

SEQ ID NO: 17715 - protein, 9 aa, Artificial Sequence
  Description of Artificial Sequence: Synthetic peptide
EAMSQMTNM

SEQ ID NO: 17716 - protein, 9 aa, Artificial Sequence
  Description of Artificial Sequence: Synthetic peptide
EVIPMFSAL

SEQ ID NO: 17717 - protein, 9 aa, Artificial Sequence
  Description of Artificial Sequence: Synthetic peptide
EVIGNIRQA

SEQ ID NO: 17718 - protein, 9 aa, Artificial Sequence
  Description of Artificial Sequence: Synthetic peptide
NTKNIIVQF

SEQ ID NO: 17719 - protein, 10 aa, Artificial Sequence
  Description of Artificial Sequence: Synthetic peptide
EVNIVTDSQY

SEQ ID NO: 17720 - protein, 9 aa, Artificial Sequence
  Description of Artificial Sequence: Synthetic peptide
DIAGTTSTL

SEQ ID NO: 17721 - protein, 9 aa, Artificial Sequence
  Description of Artificial Sequence: Synthetic peptide
QIATQLSKY

SEQ ID NO: 17722 - protein, 10 aa, Artificial Sequence
  Description of Artificial Sequence: Synthetic peptide
MVMENVTESF

SEQ ID NO: 17723 - protein, 9 aa, Artificial Sequence
  Description of Artificial Sequence: Synthetic peptide
DTSEALNKV

SEQ ID NO: 17724 - protein, 9 aa, Artificial Sequence
  Description of Artificial Sequence: Synthetic peptide
EVIGNIRQA

SEQ ID NO: 17725 - protein, 9 aa, Artificial Sequence
  Description of Artificial Sequence: Synthetic peptide
EVIPMFSAL

SEQ ID NO: 17726 - protein, 9 aa, Artificial Sequence
  Description of Artificial Sequence: Synthetic peptide
EAMSQMTNM

SEQ ID NO: 17727 - protein, 9 aa, Artificial Sequence
  Description of Artificial Sequence: Synthetic peptide
DIIGNIRQA

SEQ ID NO: 17728 - protein, 9 aa, Artificial Sequence
  Description of Artificial Sequence: Synthetic peptide
DIIGDIRQA

SEQ ID NO: 17729 - protein, 11 aa, Artificial Sequence
  Description of Artificial Sequence: Synthetic peptide
ETYYIDGAANR

SEQ ID NO: 17730 - protein, 9 aa, Artificial Sequence
  Description of Artificial Sequence: Synthetic peptide
EVIPAETGK

SEQ ID NO: 17731 - protein, 10 aa, Artificial Sequence
  Description of Artificial Sequence: Synthetic peptide
EVTTHSFNCR

SEQ ID NO: 17732 - protein, 9 aa, Artificial Sequence
  Description of Artificial Sequence: Synthetic peptide
MVHQAISPR

SEQ ID NO: 17733 - protein, 9 aa, Artificial Sequence
  Description of Artificial Sequence: Synthetic peptide
DIAGTTSTL

SEQ ID NO: 17734 - protein, 11 aa, Artificial Sequence
  Description of Artificial Sequence: Synthetic peptide
ETYYVDGAANR

SEQ ID NO: 17735 - protein, 9 aa, Artificial Sequence
  Description of Artificial Sequence: Synthetic peptide
DIIGDIRRA

SEQ ID NO: 17736 - protein, 10 aa, Artificial Sequence
  Description of Artificial Sequence: Synthetic peptide
YIIGIGIGAL

SEQ ID NO: 17737 - protein, 10 aa, Artificial Sequence
  Description of Artificial Sequence: Synthetic peptide
TLIPKQPLSR

SEQ ID NO: 17738 - protein, 9 aa, Artificial Sequence
  Description of Artificial Sequence: Synthetic peptide
EAMSQVTNA

SEQ ID NO: 17739 - protein, 9 aa, Artificial Sequence
  Description of Artificial Sequence: Synthetic peptide
ESVQINCTR

SEQ ID NO: 17740 - protein, 9 aa, Artificial Sequence
  Description of Artificial Sequence: Synthetic peptide
NITGLILTY

SEQ ID NO: 17741 - protein, 9 aa, Artificial Sequence
  Description of Artificial Sequence: Synthetic peptide
SVLDVGDAY

SEQ ID NO: 17742 - protein, 9 aa, Artificial Sequence
  Description of Artificial Sequence: Synthetic peptide
TVLDVGDAY

SEQ ID NO: 17743 - protein, 9 aa, Artificial Sequence
  Description of Artificial Sequence: Synthetic peptide
SVLDVGGAY

SEQ ID NO: 17744 - protein, 9 aa, Artificial Sequence
  Description of Artificial Sequence: Synthetic peptide
SFDPIPIHY

SEQ ID NO: 17745 - protein, 10 aa, Artificial Sequence
  Description of Artificial Sequence: Synthetic peptide
VTFEPIPIHY

SEQ ID NO: 17746 - protein, 9 aa, Artificial Sequence
  Description of Artificial Sequence: Synthetic peptide
LYNTIAVLY

SEQ ID NO: 17747 - protein, 10 aa, Artificial Sequence
  Description of Artificial Sequence: Synthetic peptide
SNITGLILTY

SEQ ID NO: 17748 - protein, 9 aa, Artificial Sequence
  Description of Artificial Sequence: Synthetic peptide
HFGPGQAFY

SEQ ID NO: 17749 - protein, 9 aa, Artificial Sequence
  Description of Artificial Sequence: Synthetic peptide
SFEPIPIHY

SEQ ID NO: 17750 - protein, 9 aa, Artificial Sequence
  Description of Artificial Sequence: Synthetic peptide
TFEPIPIHY

SEQ ID NO: 17751 - protein, 10 aa, Artificial Sequence
  Description of Artificial Sequence: Synthetic peptide
VSFDPIPIHY

SEQ ID NO: 17752 - protein, 9 aa, Artificial Sequence
  Description of Artificial Sequence: Synthetic peptide
NITGLILTY

SEQ ID NO: 17753 - protein, 9 aa, Artificial Sequence
  Description of Artificial Sequence: Synthetic peptide
HFGPGQAFY

SEQ ID NO: 17754 - protein, 9 aa, Artificial Sequence
  Description of Artificial Sequence: Synthetic peptide
VWTIVYLEY

SEQ ID NO: 17755 - protein, 9 aa, Artificial Sequence
  Description of Artificial Sequence: Synthetic peptide
GYFPDWHNY

SEQ ID NO: 17756 - protein, 9 aa, Artificial Sequence
  Description of Artificial Sequence: Synthetic peptide
SFDPIPIHY

SEQ ID NO: 17757 - protein, 9 aa, Artificial Sequence
  Description of Artificial Sequence: Synthetic peptide
GYFPDWQNY

SEQ ID NO: 17758 - protein, 9 aa, Artificial Sequence
  Description of Artificial Sequence: Synthetic peptide
SFEPIPIHY

SEQ ID NO: 17759 - protein, 10 aa, Artificial Sequence
  Description of Artificial Sequence: Synthetic peptide
VTFEPIPIHY

SEQ ID NO: 17760 - protein, 9 aa, Artificial Sequence
  Description of Artificial Sequence: Synthetic peptide
LYNTIAVLY

SEQ ID NO: 17761 - protein, 9 aa, Artificial Sequence
  Description of Artificial Sequence: Synthetic peptide
TFEPIPIHY

SEQ ID NO: 17762 - protein, 10 aa, Artificial Sequence
  Description of Artificial Sequence: Synthetic peptide
VSFDPIPIHY

SEQ ID NO: 17763 - protein, 10 aa, Artificial Sequence
  Description of Artificial Sequence: Synthetic peptide
YFSVPLHEDF

SEQ ID NO: 17764 - protein, 9 aa, Artificial Sequence
  Description of Artificial Sequence: Synthetic peptide
SVLDVGDAY

SEQ ID NO: 17765 - protein, 9 aa, Artificial Sequence
  Description of Artificial Sequence: Synthetic peptide
LFNLVAVLY

SEQ ID NO: 17766 - protein, 9 aa, Artificial Sequence
  Description of Artificial Sequence: Synthetic peptide
VWTIVYIEY

SEQ ID NO: 17767 - protein, 9 aa, Artificial Sequence
  Description of Artificial Sequence: Synthetic peptide
KLLGNLLLY

SEQ ID NO: 17768 - protein, 9 aa, Artificial Sequence
  Description of Artificial Sequence: Synthetic peptide
GNLWVTVYY

SEQ ID NO: 17769 - protein, 10 aa, Artificial Sequence
  Description of Artificial Sequence: Synthetic peptide
IHFGPGQAFY

SEQ ID NO: 17770 - protein, 9 aa, Artificial Sequence
  Description of Artificial Sequence: Synthetic peptide
SSWEMHTNY

SEQ ID NO: 17771 - protein, 9 aa, Artificial Sequence
  Description of Artificial Sequence: Synthetic peptide
TVLDVGDAY

SEQ ID NO: 17772 - protein, 9 aa, Artificial Sequence
  Description of Artificial Sequence: Synthetic peptide
YFVNRTLIF

SEQ ID NO: 17773 - protein, 10 aa, Artificial Sequence
  Description of Artificial Sequence: Synthetic peptide
GTNGTNRTLY

SEQ ID NO: 17774 - protein, 10 aa, Artificial Sequence
  Description of Artificial Sequence: Synthetic peptide
KEKEPPLTSL

SEQ ID NO: 17775 - protein, 9 aa, Artificial Sequence
  Description of Artificial Sequence: Synthetic peptide
RTKPPLPSV

SEQ ID NO: 17776 - protein, 9 aa, Artificial Sequence
  Description of Artificial Sequence: Synthetic peptide
KTKPPLPSV

SEQ ID NO: 17777 - protein, 10 aa, Artificial Sequence
  Description of Artificial Sequence: Synthetic peptide
KEQEPPLTSL

SEQ ID NO: 17778 - protein, 9 aa, Artificial Sequence
  Description of Artificial Sequence: Synthetic peptide
SEFNLPPIV

SEQ ID NO: 17779 - protein, 9 aa, Artificial Sequence
  Description of Artificial Sequence: Synthetic peptide
KIKPPLPSV

SEQ ID NO: 17780 - protein, 10 aa, Artificial Sequence
  Description of Artificial Sequence: Synthetic peptide
KDKEPPLASL

SEQ ID NO: 17781 - protein, 10 aa, Artificial Sequence
  Description of Artificial Sequence: Synthetic peptide
GEKGVGSPQI

SEQ ID NO: 17782 - protein, 10 aa, Artificial Sequence
  Description of Artificial Sequence: Synthetic peptide
GTNGTNRTLY

SEQ ID NO: 17783 - protein, 11 aa, Artificial Sequence
  Description of Artificial Sequence: Synthetic peptide
KQNPEVIIYQY

SEQ ID NO: 17784 - protein, 11 aa, Artificial Sequence
  Description of Artificial Sequence: Synthetic peptide
SVSVLDVGGAY

SEQ ID NO: 17785 - protein, 11 aa, Artificial Sequence
  Description of Artificial Sequence: Synthetic peptide
KQNPEIIIYQY

SEQ ID NO: 17786 - protein, 9 aa, Artificial Sequence
  Description of Artificial Sequence: Synthetic peptide
IINSVRQGY

SEQ ID NO: 17787 - protein, 9 aa, Artificial Sequence
  Description of Artificial Sequence: Synthetic peptide
SVLDVGGAY

SEQ ID NO: 17788 - protein, 9 aa, Artificial Sequence
  Description of Artificial Sequence: Synthetic peptide
RVMETQRNY

SEQ ID NO: 17789 - protein, 9 aa, Artificial Sequence
  Description of Artificial Sequence: Synthetic peptide
KQNPEVIIY

SEQ ID NO: 17790 - protein, 10 aa, Artificial Sequence
  Description of Artificial Sequence: Synthetic peptide
QQIATQLSKY

SEQ ID NO: 17791 - protein, 11 aa, Artificial Sequence
  Description of Artificial Sequence: Synthetic peptide
KQNPEMVIYQY

SEQ ID NO: 17792 - protein, 9 aa, Artificial Sequence
  Description of Artificial Sequence: Synthetic peptide
KVITKLGSY

SEQ ID NO: 17793 - protein, 9 aa, Artificial Sequence
  Description of Artificial Sequence: Synthetic peptide
SVLDVGDAY

SEQ ID NO: 17794 - protein, 9 aa, Artificial Sequence
  Description of Artificial Sequence: Synthetic peptide
KAQVQHEKY

SEQ ID NO: 17795 - protein, 9 aa, Artificial Sequence
  Description of Artificial Sequence: Synthetic peptide
KAQEAHERY

SEQ ID NO: 17796 - protein, 11 aa, Artificial Sequence
  Description of Artificial Sequence: Synthetic peptide
LQQIATQLSKY

SEQ ID NO: 17797 - protein, 11 aa, Artificial Sequence
  Description of Artificial Sequence: Synthetic peptide
SVSVLDVGDAY

SEQ ID NO: 17798 - protein, 9 aa, Artificial Sequence
  Description of Artificial Sequence: Synthetic peptide
KQISQIQKF

SEQ ID NO: 17799 - protein, 9 aa, Artificial Sequence
  Description of Artificial Sequence: Synthetic peptide
AQNLWVTVY

SEQ ID NO: 17800 - protein, 9 aa, Artificial Sequence
  Description of Artificial Sequence: Synthetic peptide
KQNPEMVIY

SEQ ID NO: 17801 - protein, 9 aa, Artificial Sequence
  Description of Artificial Sequence: Synthetic peptide
KQGPDQWTY

SEQ ID NO: 17802 - protein, 9 aa, Artificial Sequence
  Description of Artificial Sequence: Synthetic peptide
TVLDVGDAY

SEQ ID NO: 17803 - protein, 9 aa, Artificial Sequence
  Description of Artificial Sequence: Synthetic peptide
KQNPEIIIY

SEQ ID NO: 17804 - protein, 10 aa, Artificial Sequence
  Description of Artificial Sequence: Synthetic peptide
ILKEPVHGAY

SEQ ID NO: 17805 - protein, 11 aa, Artificial Sequence
  Description of Artificial Sequence: Synthetic peptide
KTGTEDLQSLY

SEQ ID NO: 17806 - protein, 9 aa, Artificial Sequence
  Description of Artificial Sequence: Synthetic peptide
KAQEEHERY

SEQ ID NO: 17807 - protein, 9 aa, Artificial Sequence
  Description of Artificial Sequence: Synthetic peptide
SSWEMHTNY

SEQ ID NO: 17808 - protein, 9 aa, Artificial Sequence
  Description of Artificial Sequence: Synthetic peptide
RIGPGQAFY

SEQ ID NO: 17809 - protein, 9 aa, Artificial Sequence
  Description of Artificial Sequence: Synthetic peptide
KQISNIQKF

SEQ ID NO: 17810 - protein, 9 aa, Artificial Sequence
  Description of Artificial Sequence: Synthetic peptide
IINSVRQGY

SEQ ID NO: 17811 - protein, 9 aa, Artificial Sequence
  Description of Artificial Sequence: Synthetic peptide
KQISQIQKF

SEQ ID NO: 17812 - protein, 9 aa, Artificial Sequence
  Description of Artificial Sequence: Synthetic peptide
KQISNIQKF

SEQ ID NO: 17813 - protein, 11 aa, Artificial Sequence
  Description of Artificial Sequence: Synthetic peptide
KQNPEIIIYQY

SEQ ID NO: 17814 - protein, 9 aa, Artificial Sequence
  Description of Artificial Sequence: Synthetic peptide
KQNPEVIIY

SEQ ID NO: 17815 - protein, 11 aa, Artificial Sequence
  Description of Artificial Sequence: Synthetic peptide
KQNPEVIIYQY

SEQ ID NO: 17816 - protein, 10 aa, Artificial Sequence
  Description of Artificial Sequence: Synthetic peptide
GTNGTNRTLY

SEQ ID NO: 17817 - protein, 9 aa, Artificial Sequence
  Description of Artificial Sequence: Synthetic peptide
RVMETQRNY

SEQ ID NO: 17818 - protein, 9 aa, Artificial Sequence
  Description of Artificial Sequence: Synthetic peptide
KQGPDQWTY

SEQ ID NO: 17819 - protein, 9 aa, Artificial Sequence
  Description of Artificial Sequence: Synthetic peptide
AQNLWVTVY

SEQ ID NO: 17820 - protein, 9 aa, Artificial Sequence
  Description of Artificial Sequence: Synthetic peptide
KQNPEIIIY

SEQ ID NO: 17821 - protein, 9 aa, Artificial Sequence
  Description of Artificial Sequence: Synthetic peptide
KQNPEMVIY

SEQ ID NO: 17822 - protein, 9 aa, Artificial Sequence
  Description of Artificial Sequence: Synthetic peptide
KQGQGQWTY

SEQ ID NO: 17823 - protein, 10 aa, Artificial Sequence
  Description of Artificial Sequence: Synthetic peptide
SIINSVRQGY

SEQ ID NO: 17824 - protein, 10 aa, Artificial Sequence
  Description of Artificial Sequence: Synthetic peptide
FLKKGLGISY

SEQ ID NO: 17825 - protein, 9 aa, Artificial Sequence
  Description of Artificial Sequence: Synthetic peptide
RIGPGQAFY

SEQ ID NO: 17826 - protein, 9 aa, Artificial Sequence
  Description of Artificial Sequence: Synthetic peptide
SQIQKFRVY

SEQ ID NO: 17827 - protein, 9 aa, Artificial Sequence
  Description of Artificial Sequence: Synthetic peptide
KVITKLGSY

SEQ ID NO: 17828 - protein, 11 aa, Artificial Sequence
  Description of Artificial Sequence: Synthetic peptide
KQNPEMVIYQY

SEQ ID NO: 17829 - protein, 10 aa, Artificial Sequence
  Description of Artificial Sequence: Synthetic peptide
RTKPPLPSVR

SEQ ID NO: 17830 - protein, 11 aa, Artificial Sequence
  Description of Artificial Sequence: Synthetic peptide
ATQLSKYFVNR

SEQ ID NO: 17831 - protein, 10 aa, Artificial Sequence
  Description of Artificial Sequence: Synthetic peptide
KTKPPLPSVR

SEQ ID NO: 17832 - protein, 11 aa, Artificial Sequence
  Description of Artificial Sequence: Synthetic peptide
RTNSPTSRMLR

SEQ ID NO: 17833 - protein, 10 aa, Artificial Sequence
  Description of Artificial Sequence: Synthetic peptide
TQLSKYFVNR

SEQ ID NO: 17834 - protein, 9 aa, Artificial Sequence
  Description of Artificial Sequence: Synthetic peptide
SFNVTTVLR

SEQ ID NO: 17835 - protein, 9 aa, Artificial Sequence
  Description of Artificial Sequence: Synthetic peptide
AIRGAILGR

SEQ ID NO: 17836 - protein, 11 aa, Artificial Sequence
  Description of Artificial Sequence: Synthetic peptide
VTQLGIHLNNR

SEQ ID NO: 17837 - protein, 9 aa, Artificial Sequence
  Description of Artificial Sequence: Synthetic peptide
QLSKYFVNR

SEQ ID NO: 17838 - protein, 10 aa, Artificial Sequence
  Description of Artificial Sequence: Synthetic peptide
TLIPKQPLSR

SEQ ID NO: 17839 - protein, 9 aa, Artificial Sequence
  Description of Artificial Sequence: Synthetic peptide
KGLGIYYGR

SEQ ID NO: 17840 - protein, 11 aa, Artificial Sequence
  Description of Artificial Sequence: Synthetic peptide
KTLYNVVNQLR

SEQ ID NO: 17841 - protein, 9 aa, Artificial Sequence
  Description of Artificial Sequence: Synthetic peptide
VGWPAVRER

SEQ ID NO: 17842 - protein, 11 aa, Artificial Sequence
  Description of Artificial Sequence: Synthetic peptide
RLRDLLSIVAR

SEQ ID NO: 17843 - protein, 9 aa, Artificial Sequence
  Description of Artificial Sequence: Synthetic peptide
QIYPGIKVR

SEQ ID NO: 17844 - protein, 9 aa, Artificial Sequence
  Description of Artificial Sequence: Synthetic peptide
KQIVNMWQR

SEQ ID NO: 17845 - protein, 11 aa, Artificial Sequence
  Description of Artificial Sequence: Synthetic peptide
RTNSPTSRELR

SEQ ID NO: 17846 - protein, 10 aa, Artificial Sequence
  Description of Artificial Sequence: Synthetic peptide
TQLGIHLNNR

SEQ ID NO: 17847 - protein, 9 aa, Artificial Sequence
  Description of Artificial Sequence: Synthetic peptide
KQIINMWQR

SEQ ID NO: 17848 - protein, 10 aa, Artificial Sequence
  Description of Artificial Sequence: Synthetic peptide
KIKPPLPSVR

SEQ ID NO: 17849 - protein, 9 aa, Artificial Sequence
  Description of Artificial Sequence: Synthetic peptide
RSLSLFSYR

SEQ ID NO: 17850 - protein, 11 aa, Artificial Sequence
  Description of Artificial Sequence: Synthetic peptide
TVNDIQKLVGK

SEQ ID NO: 17851 - protein, 9 aa, Artificial Sequence
  Description of Artificial Sequence: Synthetic peptide
KGLGISYGR

SEQ ID NO: 17852 - protein, 11 aa, Artificial Sequence
  Description of Artificial Sequence: Synthetic peptide
KGRPGNFLQSR

SEQ ID NO: 17853 - protein, 11 aa, Artificial Sequence
  Description of Artificial Sequence: Synthetic peptide
TVWGVKQLQAR

SEQ ID NO: 17854 - protein, 11 aa, Artificial Sequence
  Description of Artificial Sequence: Synthetic peptide
QTLIPKQPLSR

SEQ ID NO: 17855 - protein, 10 aa, Artificial Sequence
  Description of Artificial Sequence: Synthetic peptide
QVRDQAEHLR

SEQ ID NO: 17856 - protein, 9 aa, Artificial Sequence
  Description of Artificial Sequence: Synthetic peptide
RQIHSISER

SEQ ID NO: 17857 - protein, 9 aa, Artificial Sequence
  Description of Artificial Sequence: Synthetic peptide
TVKIEGQLR

SEQ ID NO: 17858 - protein, 9 aa, Artificial Sequence
  Description of Artificial Sequence: Synthetic peptide
LYNVVNQLR

SEQ ID NO: 17859 - protein, 11 aa, Artificial Sequence
  Description of Artificial Sequence: Synthetic peptide
VTINNTASTNR

SEQ ID NO: 17860 - protein, 10 aa, Artificial Sequence
  Description of Artificial Sequence: Synthetic peptide
AVLSIVGRVR

SEQ ID NO: 17861 - protein, 8 aa, Artificial Sequence
  Description of Artificial Sequence: Synthetic peptide
AVLSIVNR

SEQ ID NO: 17862 - protein, 11 aa, Artificial Sequence
  Description of Artificial Sequence: Synthetic peptide
VGPTPVNIIGR

SEQ ID NO: 17863 - protein, 9 aa, Artificial Sequence
  Description of Artificial Sequence: Synthetic peptide
IINSVRQGY

SEQ ID NO: 17864 - protein, 9 aa, Artificial Sequence
  Description of Artificial Sequence: Synthetic peptide
KQISQIQKF

SEQ ID NO: 17865 - protein, 9 aa, Artificial Sequence
  Description of Artificial Sequence: Synthetic peptide
IVNRVRQGY

SEQ ID NO: 17866 - protein, 10 aa, Artificial Sequence
  Description of Artificial Sequence: Synthetic peptide
SIINSVRQGY

SEQ ID NO: 17867 - protein, 9 aa, Artificial Sequence
  Description of Artificial Sequence: Synthetic peptide
KQISNIQKF

SEQ ID NO: 17868 - protein, 10 aa, Artificial Sequence
  Description of Artificial Sequence: Synthetic peptide
GTNGTNRTLY

SEQ ID NO: 17869 - protein, 9 aa, Artificial Sequence
  Description of Artificial Sequence: Synthetic peptide
IVGRVRQGY

SEQ ID NO: 17870 - protein, 9 aa, Artificial Sequence
  Description of Artificial Sequence: Synthetic peptide
RVMETQRNY

SEQ ID NO: 17871 - protein, 11 aa, Artificial Sequence
  Description of Artificial Sequence: Synthetic peptide
ETYYIDGAANR

SEQ ID NO: 17872 - protein, 10 aa, Artificial Sequence
  Description of Artificial Sequence: Synthetic peptide
DYNGTNGTNR

SEQ ID NO: 17873 - protein, 9 aa, Artificial Sequence
  Description of Artificial Sequence: Synthetic peptide
DNYTEVIYR

SEQ ID NO: 17874 - protein, 11 aa, Artificial Sequence
  Description of Artificial Sequence: Synthetic peptide
ETYYVDGAANR

SEQ ID NO: 17875 - protein, 11 aa, Artificial Sequence
  Description of Artificial Sequence: Synthetic peptide
EDYNGTNGTNR

SEQ ID NO: 17876 - protein, 9 aa, Artificial Sequence
  Description of Artificial Sequence: Synthetic peptide
DGIIVIVQR

SEQ ID NO: 17877 - protein, 9 aa, Artificial Sequence
  Description of Artificial Sequence: Synthetic peptide
DAKAYDTER

SEQ ID NO: 17878 - protein, 11 aa, Artificial Sequence
  Description of Artificial Sequence: Synthetic peptide
DTEELSTLVER

SEQ ID NO: 17879 - protein, 9 aa, Artificial Sequence
  Description of Artificial Sequence: Synthetic peptide
NNTNNVTFR

SEQ ID NO: 17880 - protein, 9 aa, Artificial Sequence
  Description of Artificial Sequence: Synthetic peptide
DNGTNVTLR

SEQ ID NO: 17881 - protein, 11 aa, Artificial Sequence
  Description of Artificial Sequence: Synthetic peptide
DINIGEIQEQR

SEQ ID NO: 17882 - protein, 10 aa, Artificial Sequence
  Description of Artificial Sequence: Synthetic peptide
DNSEIKVVPR

SEQ ID NO: 17883 - protein, 11 aa, Artificial Sequence
  Description of Artificial Sequence: Synthetic peptide
DVKQLTEAVQK

SEQ ID NO: 17884 - protein, 9 aa, Artificial Sequence
  Description of Artificial Sequence: Synthetic peptide
DTLEKIRLR

SEQ ID NO: 17885 - protein, 11 aa, Artificial Sequence
  Description of Artificial Sequence: Synthetic peptide
EARELSPEQAR

SEQ ID NO: 17886 - protein, 9 aa, Artificial Sequence
  Description of Artificial Sequence: Synthetic peptide
DAKAYSTEK

SEQ ID NO: 17887 - protein, 11 aa, Artificial Sequence
  Description of Artificial Sequence: Synthetic peptide
DVKQLTEVVQK

SEQ ID NO: 17888 - protein, 11 aa, Artificial Sequence
  Description of Artificial Sequence: Synthetic peptide
EPLGIAPTKAR

SEQ ID NO: 17889 - protein, 11 aa, Artificial Sequence
  Description of Artificial Sequence: Synthetic peptide
EARKFSPEQAR

SEQ ID NO: 17890 - protein, 9 aa, Artificial Sequence
  Description of Artificial Sequence: Synthetic peptide
MNTAIMVQK

SEQ ID NO: 17891 - protein, 9 aa, Artificial Sequence
  Description of Artificial Sequence: Synthetic peptide
DGLIYSKQR

SEQ ID NO: 17892 - protein, 9 aa, Artificial Sequence
  Description of Artificial Sequence: Synthetic peptide
DAWEKIRLR

SEQ ID NO: 17893 - protein, 9 aa, Artificial Sequence
  Description of Artificial Sequence: Synthetic peptide
DSHLAFRHR

SEQ ID NO: 17894 - protein, 9 aa, Artificial Sequence
  Description of Artificial Sequence: Synthetic peptide
QARVLAVER

SEQ ID NO: 17895 - protein, 9 aa, Artificial Sequence
  Description of Artificial Sequence: Synthetic peptide
SFNVTTVLR

SEQ ID NO: 17896 - protein, 9 aa, Artificial Sequence
  Description of Artificial Sequence: Synthetic peptide
ESVQINCTR

SEQ ID NO: 17897 - protein, 8 aa, Artificial Sequence
  Description of Artificial Sequence: Synthetic peptide
DLLSIVAR

SEQ ID NO: 17898 - protein, 9 aa, Artificial Sequence
  Description of Artificial Sequence: Synthetic peptide
YYIDGAANR

SEQ ID NO: 17899 - protein, 9 aa, Artificial Sequence
  Description of Artificial Sequence: Synthetic peptide
DAKAYETEK

SEQ ID NO: 17900 - protein, 9 aa, Artificial Sequence
  Description of Artificial Sequence: Synthetic peptide
MVHQAISPR

SEQ ID NO: 17901 - protein, 11 aa, Artificial Sequence
  Description of Artificial Sequence: Synthetic peptide
ETYYIDGAANR

SEQ ID NO: 17902 - protein, 10 aa, Artificial Sequence
  Description of Artificial Sequence: Synthetic peptide
DYNGTNGTNR

SEQ ID NO: 17903 - protein, 11 aa, Artificial Sequence
  Description of Artificial Sequence: Synthetic peptide
ETYYVDGAANR

SEQ ID NO: 17904 - protein, 9 aa, Artificial Sequence
  Description of Artificial Sequence: Synthetic peptide
ESVQINCTR

SEQ ID NO: 17905 - protein, 9 aa, Artificial Sequence
  Description of Artificial Sequence: Synthetic peptide
EYRKLVQQK

SEQ ID NO: 17906 - protein, 9 aa, Artificial Sequence
  Description of Artificial Sequence: Synthetic peptide
YYVDGAANR

SEQ ID NO: 17907 - protein, 11 aa, Artificial Sequence
  Description of Artificial Sequence: Synthetic peptide
EDYNGTNGTNR

SEQ ID NO: 17908 - protein, 9 aa, Artificial Sequence
  Description of Artificial Sequence: Synthetic peptide
MVHQAISPR

SEQ ID NO: 17909 - protein, 9 aa, Artificial Sequence
  Description of Artificial Sequence: Synthetic peptide
YYIDGAANR

SEQ ID NO: 17910 - protein, 11 aa, Artificial Sequence
  Description of Artificial Sequence: Synthetic peptide
EARELSPEQAR

SEQ ID NO: 17911 - protein, 9 aa, Artificial Sequence
  Description of Artificial Sequence: Synthetic peptide
SFNVTTVLR

SEQ ID NO: 17912 - protein, 9 aa, Artificial Sequence
  Description of Artificial Sequence: Synthetic peptide
ETLHKVITK

SEQ ID NO: 17913 - protein, 9 aa, Artificial Sequence
  Description of Artificial Sequence: Synthetic peptide
QARVLAVER

SEQ ID NO: 17914 - protein, 10 aa, Artificial Sequence
  Description of Artificial Sequence: Synthetic peptide
TYYVDGAANR

SEQ ID NO: 17915 - protein, 11 aa, Artificial Sequence
  Description of Artificial Sequence: Synthetic peptide
EVKDTKEALGK

SEQ ID NO: 17916 - protein, 11 aa, Artificial Sequence
  Description of Artificial Sequence: Synthetic peptide
EARKFSPEQAR

SEQ ID NO: 17917 - protein, 9 aa, Artificial Sequence
  Description of Artificial Sequence: Synthetic peptide
MYISKKANR

SEQ ID NO: 17918 - protein, 11 aa, Artificial Sequence
  Description of Artificial Sequence: Synthetic peptide
TVNDIQKLVGK

SEQ ID NO: 17919 - protein, 11 aa, Artificial Sequence
  Description of Artificial Sequence: Synthetic peptide
EPLGIAPTKTR

SEQ ID NO: 17920 - protein, 10 aa, Artificial Sequence
  Description of Artificial Sequence: Synthetic peptide
EVHIPVGDAR

SEQ ID NO: 17921 - protein, 11 aa, Artificial Sequence
  Description of Artificial Sequence: Synthetic peptide
EPLGIAPTKAR

SEQ ID NO: 17922 - protein, 10 aa, Artificial Sequence
  Description of Artificial Sequence: Synthetic peptide
EVRTHSFNCR

SEQ ID NO: 17923 - protein, 10 aa, Artificial Sequence
  Description of Artificial Sequence: Synthetic peptide
TYYIDGAANR

SEQ ID NO: 17924 - protein, 10 aa, Artificial Sequence
  Description of Artificial Sequence: Synthetic peptide
EVHIPLGEAR

SEQ ID NO: 17925 - protein, 9 aa, Artificial Sequence
  Description of Artificial Sequence: Synthetic peptide
DAKAYDTER

SEQ ID NO: 17926 - protein, 9 aa, Artificial Sequence
  Description of Artificial Sequence: Synthetic peptide
SFNVTTVIR

SEQ ID NO: 17927 - protein, 10 aa, Artificial Sequence
  Description of Artificial Sequence: Synthetic peptide
DNSEIKVVPR

SEQ ID NO: 17928 - protein, 9 aa, Artificial Sequence
  Description of Artificial Sequence: Synthetic peptide
NSEIKVVPR

SEQ ID NO: 17929 - protein, 11 aa, Artificial Sequence
  Description of Artificial Sequence: Synthetic peptide
EPLGVAPTEAR

SEQ ID NO: 17930 - protein, 9 aa, Artificial Sequence
  Description of Artificial Sequence: Synthetic peptide
YNGTNGTNR

SEQ ID NO: 17931 - protein, 9 aa, Artificial Sequence
  Description of Artificial Sequence: Synthetic peptide
DGIIVIVQR

SEQ ID NO: 17932 - protein, 9 aa, Artificial Sequence
  Description of Artificial Sequence: Synthetic peptide
DNGTNVTLR

SEQ ID NO: 17933 - protein, 9 aa, Artificial Sequence
  Description of Artificial Sequence: Synthetic peptide
LYNVVNQLR

SEQ ID NO: 17934 - protein, 9 aa, Artificial Sequence
  Description of Artificial Sequence: Synthetic peptide
QIYPGIKVR

SEQ ID NO: 17935 - protein, 9 aa, Artificial Sequence
  Description of Artificial Sequence: Synthetic peptide
DNYTEVIYR

SEQ ID NO: 17936 - protein, 10 aa, Artificial Sequence
  Description of Artificial Sequence: Synthetic peptide
VTGEVIGNIR

SEQ ID NO: 17937 - protein, 8 aa, Artificial Sequence
  Description of Artificial Sequence: Synthetic peptide
NTNNVTFR

SEQ ID NO: 17938 - protein, 9 aa, Artificial Sequence
  Description of Artificial Sequence: Synthetic peptide
DTLEKIRLR

SEQ ID NO: 17939 - protein, 9 aa, Artificial Sequence
  Description of Artificial Sequence: Synthetic peptide
NNTNNVTFR

SEQ ID NO: 17940 - protein, 9 aa, Artificial Sequence
  Description of Artificial Sequence: Synthetic peptide
TVKIEGQLR

SEQ ID NO: 17941 - protein, 10 aa, Artificial Sequence
  Description of Artificial Sequence: Synthetic peptide
EVTTHSFNCR

SEQ ID NO: 17942 - protein, 8 aa, Artificial Sequence
  Description of Artificial Sequence: Synthetic peptide
ENLAFQQR

SEQ ID NO: 17943 - protein, 10 aa, Artificial Sequence
  Description of Artificial Sequence: Synthetic peptide
ELKKIIGQVR

SEQ ID NO: 17944 - protein, 10 aa, Artificial Sequence
  Description of Artificial Sequence: Synthetic peptide
EFNLPPIVAK

SEQ ID NO: 17945 - protein, 9 aa, Artificial Sequence
  Description of Artificial Sequence: Synthetic peptide
GNNDNVTFR

SEQ ID NO: 17946 - protein, 8 aa, Artificial Sequence
  Description of Artificial Sequence: Synthetic peptide
HYDSPHPR

SEQ ID NO: 17947 - protein, 9 aa, Artificial Sequence
  Description of Artificial Sequence: Synthetic peptide
EYKKLVRQK

SEQ ID NO: 17948 - protein, 9 aa, Artificial Sequence
  Description of Artificial Sequence: Synthetic peptide
INNTASTNR

SEQ ID NO: 17949 - protein, 11 aa, Artificial Sequence
  Description of Artificial Sequence: Synthetic peptide
DTEELSTLVER

SEQ ID NO: 17950 - protein, 10 aa, Artificial Sequence
  Description of Artificial Sequence: Synthetic peptide
QVRDQAEHLR

SEQ ID NO: 17951 - protein, 8 aa, Artificial Sequence
  Description of Artificial Sequence: Synthetic peptide
NYTEVIYR

SEQ ID NO: 17952 - protein, 10 aa, Artificial Sequence
  Description of Artificial Sequence: Synthetic peptide
EVEEVIIRSK

SEQ ID NO: 17953 - protein, 11 aa, Artificial Sequence
  Description of Artificial Sequence: Synthetic peptide
ESAIRGAILGR

SEQ ID NO: 17954 - protein, 10 aa, Artificial Sequence
  Description of Artificial Sequence: Synthetic peptide
ATGDIIGNIR

SEQ ID NO: 17955 - protein, 9 aa, Artificial Sequence
  Description of Artificial Sequence: Synthetic peptide
EAMSQMTNM

SEQ ID NO: 17956 - protein, 10 aa, Artificial Sequence
  Description of Artificial Sequence: Synthetic peptide
EVHIPLGDAR

SEQ ID NO: 17957 - protein, 9 aa, Artificial Sequence
  Description of Artificial Sequence: Synthetic peptide
FNLPPIVAK

SEQ ID NO: 17958 - protein, 10 aa, Artificial Sequence
  Description of Artificial Sequence: Synthetic peptide
TQLGIHLNNR

SEQ ID NO: 17959 - protein, 9 aa, Artificial Sequence
  Description of Artificial Sequence: Synthetic peptide
EYRKLVKQK

SEQ ID NO: 17960 - protein, 9 aa, Artificial Sequence
  Description of Artificial Sequence: Synthetic peptide
SFNVTTAIR

SEQ ID NO: 17961 - protein, 9 aa, Artificial Sequence
  Description of Artificial Sequence: Synthetic peptide
MNTAIMVQK

SEQ ID NO: 17962 - protein, 9 aa, Artificial Sequence
  Description of Artificial Sequence: Synthetic peptide
EVIGNIRQA

SEQ ID NO: 17963 - protein, 9 aa, Artificial Sequence
  Description of Artificial Sequence: Synthetic peptide
EPVQINCTR

SEQ ID NO: 17964 - protein, 11 aa, Artificial Sequence
  Description of Artificial Sequence: Synthetic peptide
ENLAFQQGKAR

SEQ ID NO: 17965 - protein, 11 aa, Artificial Sequence
  Description of Artificial Sequence: Synthetic peptide
ETYYIDGAANR

SEQ ID NO: 17966 - protein, 11 aa, Artificial Sequence
  Description of Artificial Sequence: Synthetic peptide
ETYYVDGAANR

SEQ ID NO: 17967 - protein, 9 aa, Artificial Sequence
  Description of Artificial Sequence: Synthetic peptide
ESVQINCTR

SEQ ID NO: 17968 - protein, 11 aa, Artificial Sequence
  Description of Artificial Sequence: Synthetic peptide
DTEELSTLVER

SEQ ID NO: 17969 - protein, 11 aa, Artificial Sequence
  Description of Artificial Sequence: Synthetic peptide
EDYNGTNGTNR

SEQ ID NO: 17970 - protein, 10 aa, Artificial Sequence
  Description of Artificial Sequence: Synthetic peptide
EVEEVIIRSK

SEQ ID NO: 17971 - protein, 10 aa, Artificial Sequence
  Description of Artificial Sequence: Synthetic peptide
VTGEVIGNIR

SEQ ID NO: 17972 - protein, 9 aa, Artificial Sequence
  Description of Artificial Sequence: Synthetic peptide
DGIIVIVQR

SEQ ID NO: 17973 - protein, 10 aa, Artificial Sequence
  Description of Artificial Sequence: Synthetic peptide
ATGDIIGNIR

SEQ ID NO: 17974 - protein, 9 aa, Artificial Sequence
  Description of Artificial Sequence: Synthetic peptide
EVIPAETGK

SEQ ID NO: 17975 - protein, 11 aa, Artificial Sequence
  Description of Artificial Sequence: Synthetic peptide
TVNDIQKLVGK

SEQ ID NO: 17976 - protein, 11 aa, Artificial Sequence
  Description of Artificial Sequence: Synthetic peptide
PAADGVGAVSR

SEQ ID NO: 17977 - protein, 11 aa, Artificial Sequence
  Description of Artificial Sequence: Synthetic peptide
EVQDTSEALNK

SEQ ID NO: 17978 - protein, 9 aa, Artificial Sequence
  Description of Artificial Sequence: Synthetic peptide
EPVQINCTR

SEQ ID NO: 17979 - protein, 11 aa, Artificial Sequence
  Description of Artificial Sequence: Synthetic peptide
GTDGIIVIVQR

SEQ ID NO: 17980 - protein, 10 aa, Artificial Sequence
  Description of Artificial Sequence: Synthetic peptide
SLAEGQVIIR

SEQ ID NO: 17981 - protein, 10 aa, Artificial Sequence
  Description of Artificial Sequence: Synthetic peptide
DNSEIKVVPR

SEQ ID NO: 17982 - protein, 10 aa, Artificial Sequence
  Description of Artificial Sequence: Synthetic peptide
IPVDPQEVER

SEQ ID NO: 17983 - protein, 9 aa, Artificial Sequence
  Description of Artificial Sequence: Synthetic peptide
NIGEIQEQR

SEQ ID NO: 17984 - protein, 9 aa, Artificial Sequence
  Description of Artificial Sequence: Synthetic peptide
ASAAIMMQK

SEQ ID NO: 17985 - protein, 10 aa, Artificial Sequence
  Description of Artificial Sequence: Synthetic peptide
SSVNATNVTK

SEQ ID NO: 17986 - protein, 9 aa, Artificial Sequence
  Description of Artificial Sequence: Synthetic peptide
NSEIKVVPR

SEQ ID NO: 17987 - protein, 10 aa, Artificial Sequence
  Description of Artificial Sequence: Synthetic peptide
NSISKQPLSR

SEQ ID NO: 17988 - protein, 9 aa, Artificial Sequence
  Description of Artificial Sequence: Synthetic peptide
ETLHKVITK

SEQ ID NO: 17989 - protein, 11 aa, Artificial Sequence
  Description of Artificial Sequence: Synthetic peptide
VTINNTASTNR

SEQ ID NO: 17990 - protein, 11 aa, Artificial Sequence
  Description of Artificial Sequence: Synthetic peptide
PVAEGVGAVSR

SEQ ID NO: 17991 - protein, 11 aa, Artificial Sequence
  Description of Artificial Sequence: Synthetic peptide
ESSTILGTGTK

SEQ ID NO: 17992 - protein, 10 aa, Artificial Sequence
  Description of Artificial Sequence: Synthetic peptide
NTNTAIMMQK

SEQ ID NO: 17993 - protein, 9 aa, Artificial Sequence
  Description of Artificial Sequence: Synthetic peptide
DNGTNVTLR

SEQ ID NO: 17994 - protein, 9 aa, Artificial Sequence
  Description of Artificial Sequence: Synthetic peptide
LAEGQVIIR

SEQ ID NO: 17995 - protein, 9 aa, Artificial Sequence
  Description of Artificial Sequence: Synthetic peptide
SVNATNVTK

SEQ ID NO: 17996 - protein, 9 aa, Artificial Sequence
  Description of Artificial Sequence: Synthetic peptide
NNTNNVTFR

SEQ ID NO: 17997 - protein, 10 aa, Artificial Sequence
  Description of Artificial Sequence: Synthetic peptide
EVNIVTDSQY

SEQ ID NO: 17998 - protein, 10 aa, Artificial Sequence
  Description of Artificial Sequence: Synthetic peptide
NASAAIMMQK

SEQ ID NO: 17999 - protein, 9 aa, Artificial Sequence
  Description of Artificial Sequence: Synthetic peptide
TPVNITCTR

SEQ ID NO: 18000 - protein, 10 aa, Artificial Sequence
  Description of Artificial Sequence: Synthetic peptide
ASITLTVQAR

SEQ ID NO: 18001 - protein, 10 aa, Artificial Sequence
  Description of Artificial Sequence: Synthetic peptide
TVLSIINSVR

SEQ ID NO: 18002 - protein, 10 aa, Artificial Sequence
  Description of Artificial Sequence: Synthetic peptide
VAEGVGAVSR

SEQ ID NO: 18003 - protein, 11 aa, Artificial Sequence
  Description of Artificial Sequence: Synthetic peptide
DVKQLTEAVQK

SEQ ID NO: 18004 - protein, 10 aa, Artificial Sequence
  Description of Artificial Sequence: Synthetic peptide
SAIRGAILGR

SEQ ID NO: 18005 - protein, 11 aa, Artificial Sequence
  Description of Artificial Sequence: Synthetic peptide
YVDNGTNVTLR

SEQ ID NO: 18006 - protein, 10 aa, Artificial Sequence
  Description of Artificial Sequence: Synthetic peptide
DCFSDSAIRK

SEQ ID NO: 18007 - protein, 9 aa, Artificial Sequence
  Description of Artificial Sequence: Synthetic peptide
FAVLSIVNR

SEQ ID NO: 18008 - protein, 10 aa, Artificial Sequence
  Description of Artificial Sequence: Synthetic peptide
ATGDIIGDIR

SEQ ID NO: 18009 - protein, 9 aa, Artificial Sequence
  Description of Artificial Sequence: Synthetic peptide
MNTAIMVQK

SEQ ID NO: 18010 - protein, 11 aa, Artificial Sequence
  Description of Artificial Sequence: Synthetic peptide
DVKQLTEVVQK

SEQ ID NO: 18011 - protein, 10 aa, Artificial Sequence
  Description of Artificial Sequence: Synthetic peptide
NANAAIMMQK

SEQ ID NO: 18012 - protein, 11 aa, Artificial Sequence
  Description of Artificial Sequence: Synthetic peptide
YATGDIIGNIR

SEQ ID NO: 18013 - protein, 10 aa, Artificial Sequence
  Description of Artificial Sequence: Synthetic peptide
EVHIPVGDAR

SEQ ID NO: 18014 - protein, 11 aa, Artificial Sequence
  Description of Artificial Sequence: Synthetic peptide
TNMNTAIMVQK

SEQ ID NO: 18015 - protein, 10 aa, Artificial Sequence
  Description of Artificial Sequence: Synthetic peptide
TINNTASTNR

SEQ ID NO: 18016 - protein, 9 aa, Artificial Sequence
  Description of Artificial Sequence: Synthetic peptide
MVHQAISPR

SEQ ID NO: 18017 - protein, 9 aa, Artificial Sequence
  Description of Artificial Sequence: Synthetic peptide
NVTTVIRDK

SEQ ID NO: 18018 - protein, 10 aa, Artificial Sequence
  Description of Artificial Sequence: Synthetic peptide
DSPIEITCTR

SEQ ID NO: 18019 - protein, 11 aa, Artificial Sequence
  Description of Artificial Sequence: Synthetic peptide
VVALTETTNQK

SEQ ID NO: 18020 - protein, 10 aa, Artificial Sequence
  Description of Artificial Sequence: Synthetic peptide
DIIATDIQTK

SEQ ID NO: 18021 - protein, 11 aa, Artificial Sequence
  Description of Artificial Sequence: Synthetic peptide
TAIAVAEGTDR

SEQ ID NO: 18022 - protein, 11 aa, Artificial Sequence
  Description of Artificial Sequence: Synthetic peptide
YVTGEVIGNIR

SEQ ID NO: 18023 - protein, 9 aa, Artificial Sequence
  Description of Artificial Sequence: Synthetic peptide
DNYTEVIYR

SEQ ID NO: 18024 - protein, 11 aa, Artificial Sequence
  Description of Artificial Sequence: Synthetic peptide
VGPTPVNIIGR

SEQ ID NO: 18025 - protein, 10 aa, Artificial Sequence
  Description of Artificial Sequence: Synthetic peptide
AADGVGAVSR

SEQ ID NO: 18026 - protein, 11 aa, Artificial Sequence
  Description of Artificial Sequence: Synthetic peptide
ATGDIIGDIRR

SEQ ID NO: 18027 - protein, 9 aa, Artificial Sequence
  Description of Artificial Sequence: Synthetic peptide
FAVLSIVGR

SEQ ID NO: 18028 - protein, 10 aa, Artificial Sequence
  Description of Artificial Sequence: Synthetic peptide
STILGTGTKE

SEQ ID NO: 18029 - protein, 11 aa, Artificial Sequence
  Description of Artificial Sequence: Synthetic peptide
TNANAAIMMQK

SEQ ID NO: 18030 - protein, 9 aa, Artificial Sequence
  Description of Artificial Sequence: Synthetic peptide
ETAYFILKL

SEQ ID NO: 18031 - protein, 9 aa, Artificial Sequence
  Description of Artificial Sequence: Synthetic peptide
ETAYFLLKL

SEQ ID NO: 18032 - protein, 9 aa, Artificial Sequence
  Description of Artificial Sequence: Synthetic peptide
TVLSIINSV

SEQ ID NO: 18033 - protein, 9 aa, Artificial Sequence
  Description of Artificial Sequence: Synthetic peptide
QVILVAVHV

SEQ ID NO: 18034 - protein, 9 aa, Artificial Sequence
  Description of Artificial Sequence: Synthetic peptide
DTSEALNKV

SEQ ID NO: 18035 - protein, 9 aa, Artificial Sequence
  Description of Artificial Sequence: Synthetic peptide
EVIGNIRQA

SEQ ID NO: 18036 - protein, 9 aa, Artificial Sequence
  Description of Artificial Sequence: Synthetic peptide
NTIAVLYCV

SEQ ID NO: 18037 - protein, 9 aa, Artificial Sequence
  Description of Artificial Sequence: Synthetic peptide
TTSTLQEQV

SEQ ID NO: 18038 - protein, 9 aa, Artificial Sequence
  Description of Artificial Sequence: Synthetic peptide
NTKNIIVQL

SEQ ID NO: 18039 - protein, 9 aa, Artificial Sequence
  Description of Artificial Sequence: Synthetic peptide
NTSVITQAC

SEQ ID NO: 18040 - protein, 9 aa, Artificial Sequence
  Description of Artificial Sequence: Synthetic peptide
EITSHTFNC

SEQ ID NO: 18041 - protein, 9 aa, Artificial Sequence
  Description of Artificial Sequence: Synthetic peptide
QLTEVVQKI

SEQ ID NO: 18042 - protein, 9 aa, Artificial Sequence
  Description of Artificial Sequence: Synthetic peptide
TSSEVHIPV

SEQ ID NO: 18043 - protein, 9 aa, Artificial Sequence
  Description of Artificial Sequence: Synthetic peptide
TVNDIQKLV

SEQ ID NO: 18044 - protein, 9 aa, Artificial Sequence
  Description of Artificial Sequence: Synthetic peptide
ATGDIIGNI

SEQ ID NO: 18045 - protein, 9 aa, Artificial Sequence
  Description of Artificial Sequence: Synthetic peptide
EVTTHSFNC

SEQ ID NO: 18046 - protein, 9 aa, Artificial Sequence
  Description of Artificial Sequence: Synthetic peptide
ETYYIDGAA

SEQ ID NO: 18047 - protein, 11 aa, Artificial Sequence
  Description of Artificial Sequence: Synthetic peptide
ESSTILGTGTK

SEQ ID NO: 18048 - protein, 9 aa, Artificial Sequence
  Description of Artificial Sequence: Synthetic peptide
EVIYRLLEL

SEQ ID NO: 18049 - protein, 9 aa, Artificial Sequence
  Description of Artificial Sequence: Synthetic peptide
YTAFTIPSI

SEQ ID NO: 18050 - protein, 9 aa, Artificial Sequence
  Description of Artificial Sequence: Synthetic peptide
GAASITLTV

SEQ ID NO: 18051 - protein, 9 aa, Artificial Sequence
  Description of Artificial Sequence: Synthetic peptide
TTSTLQEQI

SEQ ID NO: 18052 - protein, 9 aa, Artificial Sequence
  Description of Artificial Sequence: Synthetic peptide
EVIPMFSAL

SEQ ID NO: 18053 - protein, 11 aa, Artificial Sequence
  Description of Artificial Sequence: Synthetic peptide
ETYYIDGAANR

SEQ ID NO: 18054 - protein, 9 aa, Artificial Sequence
  Description of Artificial Sequence: Synthetic peptide
VVTFIIAVI

SEQ ID NO: 18055 - protein, 10 aa, Artificial Sequence
  Description of Artificial Sequence: Synthetic peptide
NTYGDTWVGV

SEQ ID NO: 18056 - protein, 9 aa, Artificial Sequence
  Description of Artificial Sequence: Synthetic peptide
LTFGYVADL

SEQ ID NO: 18057 - protein, 9 aa, Artificial Sequence
  Description of Artificial Sequence: Synthetic peptide
NITGLILTI

SEQ ID NO: 18058 - protein, 9 aa, Artificial Sequence
  Description of Artificial Sequence: Synthetic peptide
EAMSQVTNA

SEQ ID NO: 18059 - protein, 9 aa, Artificial Sequence
  Description of Artificial Sequence: Synthetic peptide
EALGKIEEI

SEQ ID NO: 18060 - protein, 9 aa, Artificial Sequence
  Description of Artificial Sequence: Synthetic peptide
AVLSIVNRV

SEQ ID NO: 18061 - protein, 9 aa, Artificial Sequence
  Description of Artificial Sequence: Synthetic peptide
EALDKIEEI

SEQ ID NO: 18062 - protein, 9 aa, Artificial Sequence
  Description of Artificial Sequence: Synthetic peptide
DVKQLTEAV

SEQ ID NO: 18063 - protein, 9 aa, Artificial Sequence
  Description of Artificial Sequence: Synthetic peptide
ESFGFGEEI

SEQ ID NO: 18064 - protein, 9 aa, Artificial Sequence
  Description of Artificial Sequence: Synthetic peptide
MTGNPPIPV

SEQ ID NO: 18065 - protein, 9 aa, Artificial Sequence
  Description of Artificial Sequence: Synthetic peptide
ETADGCQQI

SEQ ID NO: 18066 - protein, 11 aa, Artificial Sequence
  Description of Artificial Sequence: Synthetic peptide
EVVQKIATESI

SEQ ID NO: 18067 - protein, 9 aa, Artificial Sequence
  Description of Artificial Sequence: Synthetic peptide
GTDGIIVIV

SEQ ID NO: 18068 - protein, 9 aa, Artificial Sequence
  Description of Artificial Sequence: Synthetic peptide
EIKSLFNLV

SEQ ID NO: 18069 - protein, 10 aa, Artificial Sequence
  Description of Artificial Sequence: Synthetic peptide
RPNNNTRTSI

SEQ ID NO: 18070 - protein, 9 aa, Artificial Sequence
  Description of Artificial Sequence: Synthetic peptide
SPAIFQNSM

SEQ ID NO: 18071 - protein, 8 aa, Artificial Sequence
  Description of Artificial Sequence: Synthetic peptide
TPSPRQEL

SEQ ID NO: 18072 - protein, 11 aa, Artificial Sequence
  Description of Artificial Sequence: Synthetic peptide
MPNDTGKNITL

SEQ ID NO: 18073 - protein, 9 aa, Artificial Sequence
  Description of Artificial Sequence: Synthetic peptide
SPAIFQSSM

SEQ ID NO: 18074 - protein, 9 aa, Artificial Sequence
  Description of Artificial Sequence: Synthetic peptide
TPSPKQEQL

SEQ ID NO: 18075 - protein, 9 aa, Artificial Sequence
  Description of Artificial Sequence: Synthetic peptide
SPTSRELRV

SEQ ID NO: 18076 - protein, 10 aa, Artificial Sequence
  Description of Artificial Sequence: Synthetic peptide
SPIETVPVTL

SEQ ID NO: 18077 - protein, 10 aa, Artificial Sequence
  Description of Artificial Sequence: Synthetic peptide
SIRIGPGQAF

SEQ ID NO: 18078 - protein, 9 aa, Artificial Sequence
  Description of Artificial Sequence: Synthetic peptide
YPNIKVKQL

SEQ ID NO: 18079 - protein, 9 aa, Artificial Sequence
  Description of Artificial Sequence: Synthetic peptide
IPVESSTVL

SEQ ID NO: 18080 - protein, 9 aa, Artificial Sequence
  Description of Artificial Sequence: Synthetic peptide
RPMTYKAAL

SEQ ID NO: 18081 - protein, 9 aa, Artificial Sequence
  Description of Artificial Sequence: Synthetic peptide
GPSHKARVL

SEQ ID NO: 18082 - protein, 9 aa, Artificial Sequence
  Description of Artificial Sequence: Synthetic peptide
SPTSRMLRV

SEQ ID NO: 18083 - protein, 8 aa, Artificial Sequence
  Description of Artificial Sequence: Synthetic peptide
KPVVSTQL

SEQ ID NO: 18084 - protein, 8 aa, Artificial Sequence
  Description of Artificial Sequence: Synthetic peptide
RPVVSTQL

SEQ ID NO: 18085 - protein, 10 aa, Artificial Sequence
  Description of Artificial Sequence: Synthetic peptide
SPIETVPVKL

SEQ ID NO: 18086 - protein, 9 aa, Artificial Sequence
  Description of Artificial Sequence: Synthetic peptide
RPMTYKGAL

SEQ ID NO: 18087 - protein, 10 aa, Artificial Sequence
  Description of Artificial Sequence: Synthetic peptide
KEKEPPLTSL

SEQ ID NO: 18088 - protein, 10 aa, Artificial Sequence
  Description of Artificial Sequence: Synthetic peptide
KEQEPPLTSL

SEQ ID NO: 18089 - protein, 9 aa, Artificial Sequence
  Description of Artificial Sequence: Synthetic peptide
APPIQGNIM

SEQ ID NO: 18090 - protein, 9 aa, Artificial Sequence
  Description of Artificial Sequence: Synthetic peptide
TPQDLNAML

SEQ ID NO: 18091 - protein, 9 aa, Artificial Sequence
  Description of Artificial Sequence: Synthetic peptide
VPLTKEAEL

SEQ ID NO: 18092 - protein, 9 aa, Artificial Sequence
  Description of Artificial Sequence: Synthetic peptide
YPNIKVKQL

SEQ ID NO: 18093 - protein, 9 aa, Artificial Sequence
  Description of Artificial Sequence: Synthetic peptide
RGKQKVVSL

SEQ ID NO: 18094 - protein, 9 aa, Artificial Sequence
  Description of Artificial Sequence: Synthetic peptide
KGKQKVVAL

SEQ ID NO: 18095 - protein, 9 aa, Artificial Sequence
  Description of Artificial Sequence: Synthetic peptide
HLNNRTISF

SEQ ID NO: 18096 - protein, 9 aa, Artificial Sequence
  Description of Artificial Sequence: Synthetic peptide
ELKNSAISL

SEQ ID NO: 18097 - protein, 9 aa, Artificial Sequence
  Description of Artificial Sequence: Synthetic peptide
DIKQLTEAV

SEQ ID NO: 18098 - protein, 9 aa, Artificial Sequence
  Description of Artificial Sequence: Synthetic peptide
RGKQKIVSL

SEQ ID NO: 18099 - protein, 8 aa, Artificial Sequence
  Description of Artificial Sequence: Synthetic peptide
DPIPKQPL

SEQ ID NO: 18100 - protein, 9 aa, Artificial Sequence
  Description of Artificial Sequence: Synthetic peptide
DVKDTKEAL

SEQ ID NO: 18101 - protein, 9 aa, Artificial Sequence
  Description of Artificial Sequence: Synthetic peptide
VPLTKEAEL

SEQ ID NO: 18102 - protein, 9 aa, Artificial Sequence
  Description of Artificial Sequence: Synthetic peptide
DVKQLTEAV

SEQ ID NO: 18103 - protein, 9 aa, Artificial Sequence
  Description of Artificial Sequence: Synthetic peptide
DSAIRKAIL

SEQ ID NO: 18104 - protein, 9 aa, Artificial Sequence
  Description of Artificial Sequence: Synthetic peptide
DKQQKVHAL

SEQ ID NO: 18105 - protein, 8 aa, Artificial Sequence
  Description of Artificial Sequence: Synthetic peptide
TTNQKTEL

SEQ ID NO: 18106 - protein, 9 aa, Artificial Sequence
  Description of Artificial Sequence: Synthetic peptide
SIVARTVEL

SEQ ID NO: 18107 - protein, 9 aa, Artificial Sequence
  Description of Artificial Sequence: Synthetic peptide
DMEVRTHSF

SEQ ID NO: 18108 - protein, 8 aa, Artificial Sequence
  Description of Artificial Sequence: Synthetic peptide
HLKTAVQM

SEQ ID NO: 18109 - protein, 9 aa, Artificial Sequence
  Description of Artificial Sequence: Synthetic peptide
DKNQKVHAL

SEQ ID NO: 18110 - protein, 9 aa, Artificial Sequence
  Description of Artificial Sequence: Synthetic peptide
TGHNKVGSL

SEQ ID NO: 18111 - protein, 11 aa, Artificial Sequence
  Description of Artificial Sequence: Synthetic peptide
MPNDTGKNITL

SEQ ID NO: 18112 - protein, 9 aa, Artificial Sequence
  Description of Artificial Sequence: Synthetic peptide
LIVVRTVEL

SEQ ID NO: 18113 - protein, 11 aa, Artificial Sequence
  Description of Artificial Sequence: Synthetic peptide
TQIDPDLADQL

SEQ ID NO: 18114 - protein, 11 aa, Artificial Sequence
  Description of Artificial Sequence: Synthetic peptide
TQVDPGLADQL

SEQ ID NO: 18115 - protein, 11 aa, Artificial Sequence
  Description of Artificial Sequence: Synthetic peptide
TQVDPDLADQL

SEQ ID NO: 18116 - protein, 11 aa, Artificial Sequence
  Description of Artificial Sequence: Synthetic peptide
TQVEPGLADQL

SEQ ID NO: 18117 - protein, 9 aa, Artificial Sequence
  Description of Artificial Sequence: Synthetic peptide
KQISQIQKF

SEQ ID NO: 18118 - protein, 9 aa, Artificial Sequence
  Description of Artificial Sequence: Synthetic peptide
QLTEVVQKI

SEQ ID NO: 18119 - protein, 10 aa, Artificial Sequence
  Description of Artificial Sequence: Synthetic peptide
KQINNYTDEI

SEQ ID NO: 18120 - protein, 10 aa, Artificial Sequence
  Description of Artificial Sequence: Synthetic peptide
AQEEAEEVGF

SEQ ID NO: 18121 - protein, 10 aa, Artificial Sequence
  Description of Artificial Sequence: Synthetic peptide
GQVRDQAEHL

SEQ ID NO: 18122 - protein, 9 aa, Artificial Sequence
  Description of Artificial Sequence: Synthetic peptide
KQISNIQKF

SEQ ID NO: 18123 - protein, 11 aa, Artificial Sequence
  Description of Artificial Sequence: Synthetic peptide
TQQEQNEQDLL

SEQ ID NO: 18124 - protein, 10 aa, Artificial Sequence
  Description of Artificial Sequence: Synthetic peptide
YVDNGTNVTL

SEQ ID NO: 18125 - protein, 9 aa, Artificial Sequence
  Description of Artificial Sequence: Synthetic peptide
GQGASIEEM

SEQ ID NO: 18126 - protein, 10 aa, Artificial Sequence
  Description of Artificial Sequence: Synthetic peptide
AQEDGEEVGF

SEQ ID NO: 18127 - protein, 10 aa, Artificial Sequence
  Description of Artificial Sequence: Synthetic peptide
KQLTEAVQKI

SEQ ID NO: 18128 - protein, 9 aa, Artificial Sequence
  Description of Artificial Sequence: Synthetic peptide
VLANVTENF

SEQ ID NO: 18129 - protein, 9 aa, Artificial Sequence
  Description of Artificial Sequence: Synthetic peptide
QLTEVVQKI

SEQ ID NO: 18130 - protein, 9 aa, Artificial Sequence
  Description of Artificial Sequence: Synthetic peptide
HQVVTQLGI

SEQ ID NO: 18131 - protein, 9 aa, Artificial Sequence
  Description of Artificial Sequence: Synthetic peptide
QQHMLQLTV

SEQ ID NO: 18132 - protein, 9 aa, Artificial Sequence
  Description of Artificial Sequence: Synthetic peptide
GAASITLTV

SEQ ID NO: 18133 - protein, 9 aa, Artificial Sequence
  Description of Artificial Sequence: Synthetic peptide
QLTEAVQKI

SEQ ID NO: 18134 - protein, 8 aa, Artificial Sequence
  Description of Artificial Sequence: Synthetic peptide
GQMVHQAI

SEQ ID NO: 18135 - protein, 9 aa, Artificial Sequence
  Description of Artificial Sequence: Synthetic peptide
SQIYPGIKV

SEQ ID NO: 18136 - protein, 8 aa, Artificial Sequence
  Description of Artificial Sequence: Synthetic peptide
GQVILVAV

SEQ ID NO: 18137 - protein, 9 aa, Artificial Sequence
  Description of Artificial Sequence: Synthetic peptide
SQIYPNIKV

SEQ ID NO: 18138 - protein, 9 aa, Artificial Sequence
  Description of Artificial Sequence: Synthetic peptide
GQVDCSPGI

SEQ ID NO: 18139 - protein, 9 aa, Artificial Sequence
  Description of Artificial Sequence: Synthetic peptide
VQLKTPVNI

SEQ ID NO: 18140 - protein, 9 aa, Artificial Sequence
  Description of Artificial Sequence: Synthetic peptide
VQFNESVQI

SEQ ID NO: 18141 - protein, 9 aa, Artificial Sequence
  Description of Artificial Sequence: Synthetic peptide
VQKIATESI

SEQ ID NO: 18142 - protein, 8 aa, Artificial Sequence
  Description of Artificial Sequence: Synthetic peptide
VQIEPLGI

SEQ ID NO: 18143 - protein, 9 aa, Artificial Sequence
  Description of Artificial Sequence: Synthetic peptide
GQGQWTYQI

SEQ ID NO: 18144 - protein, 9 aa, Artificial Sequence
  Description of Artificial Sequence: Synthetic peptide
VQLDSPIEI

SEQ ID NO: 18145 - protein, 9 aa, Artificial Sequence
  Description of Artificial Sequence: Synthetic peptide
VQLNEPVQI

SEQ ID NO: 18146 - protein, 9 aa, Artificial Sequence
  Description of Artificial Sequence: Synthetic peptide
AVLSIVNRV

SEQ ID NO: 18147 - protein, 10 aa, Artificial Sequence
  Description of Artificial Sequence: Synthetic peptide
AQGQMVHQAI

SEQ ID NO: 18148 - protein, 9 aa, Artificial Sequence
  Description of Artificial Sequence: Synthetic peptide
RQHMLQLTV

SEQ ID NO: 18149 - protein, 9 aa, Artificial Sequence
  Description of Artificial Sequence: Synthetic peptide
VQKISTESI

SEQ ID NO: 18150 - protein, 9 aa, Artificial Sequence
  Description of Artificial Sequence: Synthetic peptide
VQNAQGQMV

SEQ ID NO: 18151 - protein, 9 aa, Artificial Sequence
  Description of Artificial Sequence: Synthetic peptide
TVLSIINSV

SEQ ID NO: 18152 - protein, 9 aa, Artificial Sequence
  Description of Artificial Sequence: Synthetic peptide
GQAMYAPPI

SEQ ID NO: 18153 - protein, 9 aa, Artificial Sequence
  Description of Artificial Sequence: Synthetic peptide
KQVGTLQYL

SEQ ID NO: 18154 - protein, 9 aa, Artificial Sequence
  Description of Artificial Sequence: Synthetic peptide
VLAEAMSQV

SEQ ID NO: 18155 - protein, 10 aa, Artificial Sequence
  Description of Artificial Sequence: Synthetic peptide
KQLTEAVQKI

SEQ ID NO: 18156 - protein, 10 aa, Artificial Sequence
  Description of Artificial Sequence: Synthetic peptide
RQYDQVAIEI

SEQ ID NO: 18157 - protein, 9 aa, Artificial Sequence
  Description of Artificial Sequence: Synthetic peptide
GQLQPALKT

SEQ ID NO: 18158 - protein, 9 aa, Artificial Sequence
  Description of Artificial Sequence: Synthetic peptide
TLYNVVNQL

SEQ ID NO: 18159 - protein, 9 aa, Artificial Sequence
  Description of Artificial Sequence: Synthetic peptide
RQIDNYTEV

SEQ ID NO: 18160 - protein, 10 aa, Artificial Sequence
  Description of Artificial Sequence: Synthetic peptide
SQVTNTNTAI

SEQ ID NO: 18161 - protein, 9 aa, Artificial Sequence
  Description of Artificial Sequence: Synthetic peptide
YQLETEPIV

SEQ ID NO: 18162 - protein, 9 aa, Artificial Sequence
  Description of Artificial Sequence: Synthetic peptide
NITGLILTI

SEQ ID NO: 18163 - protein, 9 aa, Artificial Sequence
  Description of Artificial Sequence: Synthetic peptide
VVKIEPLGV

SEQ ID NO: 18164 - protein, 9 aa, Artificial Sequence
  Description of Artificial Sequence: Synthetic peptide
NQVGSLQYL

SEQ ID NO: 18165 - protein, 9 aa, Artificial Sequence
  Description of Artificial Sequence: Synthetic peptide
SLAEGQVII

SEQ ID NO: 18166 - protein, 9 aa, Artificial Sequence
  Description of Artificial Sequence: Synthetic peptide
SLQDHQNSI

SEQ ID NO: 18167 - protein, 9 aa, Artificial Sequence
  Description of Artificial Sequence: Synthetic peptide
KQISQIQKF

SEQ ID NO: 18168 - protein, 9 aa, Artificial Sequence
  Description of Artificial Sequence: Synthetic peptide
GQEQWTYQI

SEQ ID NO: 18169 - protein, 9 aa, Artificial Sequence
  Description of Artificial Sequence: Synthetic peptide
KQISNIQKF

SEQ ID NO: 18170 - protein, 10 aa, Artificial Sequence
  Description of Artificial Sequence: Synthetic peptide
KQLTEVVQKI

SEQ ID NO: 18171 - protein, 9 aa, Artificial Sequence
  Description of Artificial Sequence: Synthetic peptide
QVILVAVHV

SEQ ID NO: 18172 - protein, 9 aa, Artificial Sequence
  Description of Artificial Sequence: Synthetic peptide
VVKIEPLGI

SEQ ID NO: 18173 - protein, 8 aa, Artificial Sequence
  Description of Artificial Sequence: Synthetic peptide
GQETAYFI

SEQ ID NO: 18174 - protein, 10 aa, Artificial Sequence
  Description of Artificial Sequence: Synthetic peptide
RQTEPAAEGV

SEQ ID NO: 18175 - protein, 10 aa, Artificial Sequence
  Description of Artificial Sequence: Synthetic peptide
GQVILVAVHV

SEQ ID NO: 18176 - protein, 9 aa, Artificial Sequence
  Description of Artificial Sequence: Synthetic peptide
NQKTELQAI

SEQ ID NO: 18177 - protein, 9 aa, Artificial Sequence
  Description of Artificial Sequence: Synthetic peptide
ALQDSGLEV

SEQ ID NO: 18178 - protein, 10 aa, Artificial Sequence
  Description of Artificial Sequence: Synthetic peptide
RQYEQVAIEI

SEQ ID NO: 18179 - protein, 9 aa, Artificial Sequence
  Description of Artificial Sequence: Synthetic peptide
ERYLRDQQL

SEQ ID NO: 18180 - protein, 8 aa, Artificial Sequence
  Description of Artificial Sequence: Synthetic peptide
ERVLATCL

SEQ ID NO: 18181 - protein, 9 aa, Artificial Sequence
  Description of Artificial Sequence: Synthetic peptide
ERYLKDQQL

SEQ ID NO: 18182 - protein, 8 aa, Artificial Sequence
  Description of Artificial Sequence: Synthetic peptide
ERILTSCL

SEQ ID NO: 18183 - protein, 9 aa, Artificial Sequence
  Description of Artificial Sequence: Synthetic peptide
DRFALNPDL

SEQ ID NO: 18184 - protein, 8 aa, Artificial Sequence
  Description of Artificial Sequence: Synthetic peptide
ERILHTCL

SEQ ID NO: 18185 - protein, 9 aa, Artificial Sequence
  Description of Artificial Sequence: Synthetic peptide
ERFALNPGL

SEQ ID NO: 18186 - protein, 9 aa, Artificial Sequence
  Description of Artificial Sequence: Synthetic peptide
ERYLRDQQL

SEQ ID NO: 18187 - protein, 8 aa, Artificial Sequence
  Description of Artificial Sequence: Synthetic peptide
ERILHTCL

SEQ ID NO: 18188 - protein, 9 aa, Artificial Sequence
  Description of Artificial Sequence: Synthetic peptide
ERYLKDQQL

SEQ ID NO: 18189 - protein, 9 aa, Artificial Sequence
  Description of Artificial Sequence: Synthetic peptide
DKQQRVHAL

SEQ ID NO: 18190 - protein, 8 aa, Artificial Sequence
  Description of Artificial Sequence: Synthetic peptide
NETLHKVI

SEQ ID NO: 18191 - protein, 8 aa, Artificial Sequence
  Description of Artificial Sequence: Synthetic peptide
GQMVHQAI

SEQ ID NO: 18192 - protein, 8 aa, Artificial Sequence
  Description of Artificial Sequence: Synthetic peptide
DQLIHTHY

SEQ ID NO: 18193 - protein, 8 aa, Artificial Sequence
  Description of Artificial Sequence: Synthetic peptide
ERVLATCL

SEQ ID NO: 18194 - protein, 9 aa, Artificial Sequence
  Description of Artificial Sequence: Synthetic peptide
DRKKKVQAL

SEQ ID NO: 18195 - protein, 8 aa, Artificial Sequence
  Description of Artificial Sequence: Synthetic peptide
IQKLVGKL

SEQ ID NO: 18196 - protein, 9 aa, Artificial Sequence
  Description of Artificial Sequence: Synthetic peptide
DEIYRLLEV

SEQ ID NO: 18197 - protein, 8 aa, Artificial Sequence
  Description of Artificial Sequence: Synthetic peptide
ERILTSCL

SEQ ID NO: 18198 - protein, 9 aa, Artificial Sequence
  Description of Artificial Sequence: Synthetic peptide
AQNLWVTVY

SEQ ID NO: 18199 - protein, 9 aa, Artificial Sequence
  Description of Artificial Sequence: Synthetic peptide
KQISNIQKF

SEQ ID NO: 18200 - protein, 9 aa, Artificial Sequence
  Description of Artificial Sequence: Synthetic peptide
KQISQIQKF

SEQ ID NO: 18201 - protein, 10 aa, Artificial Sequence
  Description of Artificial Sequence: Synthetic peptide
QQIATQLSKY

SEQ ID NO: 18202 - protein, 9 aa, Artificial Sequence
  Description of Artificial Sequence: Synthetic peptide
IINSVRQGY

SEQ ID NO: 18203 - protein, 9 aa, Artificial Sequence
  Description of Artificial Sequence: Synthetic peptide
KQNPEVIIY

SEQ ID NO: 18204 - protein, 9 aa, Artificial Sequence
  Description of Artificial Sequence: Synthetic peptide
KQNPEMVIY

SEQ ID NO: 18205 - protein, 9 aa, Artificial Sequence
  Description of Artificial Sequence: Synthetic peptide
VLANVTENF

SEQ ID NO: 18206 - protein, 8 aa, Artificial Sequence
  Description of Artificial Sequence: Synthetic peptide
GQYIYNTY

SEQ ID NO: 18207 - protein, 8 aa, Artificial Sequence
  Description of Artificial Sequence: Synthetic peptide
GQHIYNTY

SEQ ID NO: 18208 - protein, 9 aa, Artificial Sequence
  Description of Artificial Sequence: Synthetic peptide
KQGPDQWTY

SEQ ID NO: 18209 - protein, 9 aa, Artificial Sequence
  Description of Artificial Sequence: Synthetic peptide
RVMETQRNY

SEQ ID NO: 18210 - protein, 9 aa, Artificial Sequence
  Description of Artificial Sequence: Synthetic peptide
KQNPEIIIY

SEQ ID NO: 18211 - protein, 11 aa, Artificial Sequence
  Description of Artificial Sequence: Synthetic peptide
IQKQGPDQWTY

SEQ ID NO: 18212 - protein, 9 aa, Artificial Sequence
  Description of Artificial Sequence: Synthetic peptide
SVLDVGGAY

SEQ ID NO: 18213 - protein, 9 aa, Artificial Sequence
  Description of Artificial Sequence: Synthetic peptide
AIMMQKSNF

SEQ ID NO: 18214 - protein, 9 aa, Artificial Sequence
  Description of Artificial Sequence: Synthetic peptide
TQACPKVSF

SEQ ID NO: 18215 - protein, 9 aa, Artificial Sequence
  Description of Artificial Sequence: Synthetic peptide
VQKIATESI

SEQ ID NO: 18216 - protein, 9 aa, Artificial Sequence
  Description of Artificial Sequence: Synthetic peptide
KQGQGQWTY

SEQ ID NO: 18217 - protein, 9 aa, Artificial Sequence
  Description of Artificial Sequence: Synthetic peptide
VLAEAMSQM

SEQ ID NO: 18218 - protein, 9 aa, Artificial Sequence
  Description of Artificial Sequence: Synthetic peptide
TQACPKVTF

SEQ ID NO: 18219 - protein, 9 aa, Artificial Sequence
  Description of Artificial Sequence: Synthetic peptide
KQGQEQWTY

SEQ ID NO: 18220 - protein, 9 aa, Artificial Sequence
  Description of Artificial Sequence: Synthetic peptide
TQIGCTLNF

SEQ ID NO: 18221 - protein, 10 aa, Artificial Sequence
  Description of Artificial Sequence: Synthetic peptide
GTNGTNRTLY

SEQ ID NO: 18222 - protein, 9 aa, Artificial Sequence
  Description of Artificial Sequence: Synthetic peptide
SVLDVGDAY

SEQ ID NO: 18223 - protein, 10 aa, Artificial Sequence
  Description of Artificial Sequence: Synthetic peptide
SIINSVRQGY

SEQ ID NO: 18224 - protein, 9 aa, Artificial Sequence
  Description of Artificial Sequence: Synthetic peptide
IQKQGQEQW

SEQ ID NO: 18225 - protein, 9 aa, Artificial Sequence
  Description of Artificial Sequence: Synthetic peptide
VQKISTESI

SEQ ID NO: 18226 - protein, 9 aa, Artificial Sequence
  Description of Artificial Sequence: Synthetic peptide
TVLDVGDAY

SEQ ID NO: 18227 - protein, 9 aa, Artificial Sequence
  Description of Artificial Sequence: Synthetic peptide
SQIQKFRVY

SEQ ID NO: 18228 - protein, 9 aa, Artificial Sequence
  Description of Artificial Sequence: Synthetic peptide
VQQEFGIPY

SEQ ID NO: 18229 - protein, 10 aa, Artificial Sequence
  Description of Artificial Sequence: Synthetic peptide
MVMENVTESF

SEQ ID NO: 18230 - protein, 9 aa, Artificial Sequence
  Description of Artificial Sequence: Synthetic peptide
IHIGPGQAF

SEQ ID NO: 18231 - protein, 9 aa, Artificial Sequence
  Description of Artificial Sequence: Synthetic peptide
IRIGPGQAF

SEQ ID NO: 18232 - protein, 10 aa, Artificial Sequence
  Description of Artificial Sequence: Synthetic peptide
VPIDNNSTQY

SEQ ID NO: 18233 - protein, 10 aa, Artificial Sequence
  Description of Artificial Sequence: Synthetic peptide
ILKEPVHGAY

SEQ ID NO: 18234 - protein, 9 aa, Artificial Sequence
  Description of Artificial Sequence: Synthetic peptide
RIGPGQAFY

SEQ ID NO: 18235 - protein, 9 aa, Artificial Sequence
  Description of Artificial Sequence: Synthetic peptide
IQQEFGIPY

SEQ ID NO: 18236 - protein, 9 aa, Artificial Sequence
  Description of Artificial Sequence: Synthetic peptide
GQVILVAVH

SEQ ID NO: 18237 - protein, 8 aa, Artificial Sequence
  Description of Artificial Sequence: Synthetic peptide
AQVQHEKY

SEQ ID NO: 18238 - protein, 8 aa, Artificial Sequence
  Description of Artificial Sequence: Synthetic peptide
KQVGTLQY

SEQ ID NO: 18239 - protein, 8 aa, Artificial Sequence
  Description of Artificial Sequence: Synthetic peptide
AVHVASGY

SEQ ID NO: 18240 - protein, 9 aa, Artificial Sequence
  Description of Artificial Sequence: Synthetic peptide
QIATQLSKY

SEQ ID NO: 18241 - protein, 10 aa, Artificial Sequence
  Description of Artificial Sequence: Synthetic peptide
GIHIGPGQAF

SEQ ID NO: 18242 - protein, 11 aa, Artificial Sequence
  Description of Artificial Sequence: Synthetic peptide
KQNPEVIIYQY

SEQ ID NO: 18243 - protein, 9 aa, Artificial Sequence
  Description of Artificial Sequence: Synthetic peptide
FLGAAGSTM

SEQ ID NO: 18244 - protein, 8 aa, Artificial Sequence
  Description of Artificial Sequence: Synthetic peptide
GQMVHQAI

SEQ ID NO: 18245 - protein, 9 aa, Artificial Sequence
  Description of Artificial Sequence: Synthetic peptide
IQQDFGIPY

SEQ ID NO: 18246 - protein, 10 aa, Artificial Sequence
  Description of Artificial Sequence: Synthetic peptide
AGAERTGTSF

SEQ ID NO: 18247 - protein, 9 aa, Artificial Sequence
  Description of Artificial Sequence: Synthetic peptide
EQKLTNCSF

SEQ ID NO: 18248 - protein, 9 aa, Artificial Sequence
  Description of Artificial Sequence: Synthetic peptide
GAERTGTSF

SEQ ID NO: 18249 - protein, 9 aa, Artificial Sequence
  Description of Artificial Sequence: Synthetic peptide
AGNLWVTVY

SEQ ID NO: 18250 - protein, 9 aa, Artificial Sequence
  Description of Artificial Sequence: Synthetic peptide
VMENVTESF

SEQ ID NO: 18251 - protein, 9 aa, Artificial Sequence
  Description of Artificial Sequence: Synthetic peptide
KVITKLGSY

SEQ ID NO: 18252 - protein, 11 aa, Artificial Sequence
  Description of Artificial Sequence: Synthetic peptide
LQQIATQLSKY

SEQ ID NO: 18253 - protein, 8 aa, Artificial Sequence
  Description of Artificial Sequence: Synthetic peptide
NQVGSLQY

SEQ ID NO: 18254 - protein, 9 aa, Artificial Sequence
  Description of Artificial Sequence: Synthetic peptide
EQNPEMVIY

SEQ ID NO: 18255 - protein, 9 aa, Artificial Sequence
  Description of Artificial Sequence: Synthetic peptide
VLENVTETF

SEQ ID NO: 18256 - protein, 9 aa, Artificial Sequence
  Description of Artificial Sequence: Synthetic peptide
KAQVQHEKY

SEQ ID NO: 18257 - protein, 9 aa, Artificial Sequence
  Description of Artificial Sequence: Synthetic peptide
YTPGPGEGY

SEQ ID NO: 18258 - protein, 9 aa, Artificial Sequence
  Description of Artificial Sequence: Synthetic peptide
HLNNRTISF

SEQ ID NO: 18259 - protein, 8 aa, Artificial Sequence
  Description of Artificial Sequence: Synthetic peptide
WQRVGQAM

SEQ ID NO: 18260 - protein, 9 aa, Artificial Sequence
  Description of Artificial Sequence: Synthetic peptide
DARLVITTY

SEQ ID NO: 18261 - protein, 9 aa, Artificial Sequence
  Description of Artificial Sequence: Synthetic peptide
TVLDVGDAY

SEQ ID NO: 18262 - protein, 9 aa, Artificial Sequence
  Description of Artificial Sequence: Synthetic peptide
FLGAAGSTM

SEQ ID NO: 18263 - protein, 10 aa, Artificial Sequence
  Description of Artificial Sequence: Synthetic peptide
MVMENVTESF

SEQ ID NO: 18264 - protein, 9 aa, Artificial Sequence
  Description of Artificial Sequence: Synthetic peptide
SVLDVGGAY

SEQ ID NO: 18265 - protein, 10 aa, Artificial Sequence
  Description of Artificial Sequence: Synthetic peptide
VPIDNNSTQY

SEQ ID NO: 18266 - protein, 8 aa, Artificial Sequence
  Description of Artificial Sequence: Synthetic peptide
DQLIHTHY

SEQ ID NO: 18267 - protein, 9 aa, Artificial Sequence
  Description of Artificial Sequence: Synthetic peptide
VLAEAMSQM

SEQ ID NO: 18268 - protein, 9 aa, Artificial Sequence
  Description of Artificial Sequence: Synthetic peptide
SVLDVGDAY

SEQ ID NO: 18269 - protein, 9 aa, Artificial Sequence
  Description of Artificial Sequence: Synthetic peptide
EARLVITTY

SEQ ID NO: 18270 - protein, 9 aa, Artificial Sequence
  Description of Artificial Sequence: Synthetic peptide
HLNNRTISF

SEQ ID NO: 18271 - protein, 9 aa, Artificial Sequence
  Description of Artificial Sequence: Synthetic peptide
TQACPKVSF

SEQ ID NO: 18272 - protein, 9 aa, Artificial Sequence
  Description of Artificial Sequence: Synthetic peptide
EPIAGAETY

SEQ ID NO: 18273 - protein, 9 aa, Artificial Sequence
  Description of Artificial Sequence: Synthetic peptide
EPIVGAETY

SEQ ID NO: 18274 - protein, 9 aa, Artificial Sequence
  Description of Artificial Sequence: Synthetic peptide
EPIEGAETY

SEQ ID NO: 18275 - protein, 10 aa, Artificial Sequence
  Description of Artificial Sequence: Synthetic peptide
MVLENVTETF

SEQ ID NO: 18276 - protein, 9 aa, Artificial Sequence
  Description of Artificial Sequence: Synthetic peptide
TLRPGGGDM

SEQ ID NO: 18277 - protein, 9 aa, Artificial Sequence
  Description of Artificial Sequence: Synthetic peptide
TVGGHQAAM

SEQ ID NO: 18278 - protein, 10 aa, Artificial Sequence
  Description of Artificial Sequence: Synthetic peptide
SIRIGPGQAF

SEQ ID NO: 18279 - protein, 9 aa, Artificial Sequence
  Description of Artificial Sequence: Synthetic peptide
TQACPKVTF

SEQ ID NO: 18280 - protein, 9 aa, Artificial Sequence
  Description of Artificial Sequence: Synthetic peptide
EQKLTNCSF

SEQ ID NO: 18281 - protein, 9 aa, Artificial Sequence
  Description of Artificial Sequence: Synthetic peptide
NITGLILTY

SEQ ID NO: 18282 - protein, 9 aa, Artificial Sequence
  Description of Artificial Sequence: Synthetic peptide
TLYNVVNQL

SEQ ID NO: 18283 - protein, 9 aa, Artificial Sequence
  Description of Artificial Sequence: Synthetic peptide
IRIGPGQAF

SEQ ID NO: 18284 - protein, 9 aa, Artificial Sequence
  Description of Artificial Sequence: Synthetic peptide
SPAIFQNSM

SEQ ID NO: 18285 - protein, 8 aa, Artificial Sequence
  Description of Artificial Sequence: Synthetic peptide
DQLIHLHY

SEQ ID NO: 18286 - protein, 9 aa, Artificial Sequence
  Description of Artificial Sequence: Synthetic peptide
EQNPEMVIY

SEQ ID NO: 18287 - protein, 9 aa, Artificial Sequence
  Description of Artificial Sequence: Synthetic peptide
AQNLWVTVY

SEQ ID NO: 18288 - protein, 9 aa, Artificial Sequence
  Description of Artificial Sequence: Synthetic peptide
IHIGPGQAF

SEQ ID NO: 18289 - protein, 9 aa, Artificial Sequence
  Description of Artificial Sequence: Synthetic peptide
EARLVIITY

SEQ ID NO: 18290 - protein, 9 aa, Artificial Sequence
  Description of Artificial Sequence: Synthetic peptide
QIATQLSKY

SEQ ID NO: 18291 - protein, 8 aa, Artificial Sequence
  Description of Artificial Sequence: Synthetic peptide
GQYIYNTY

SEQ ID NO: 18292 - protein, 8 aa, Artificial Sequence
  Description of Artificial Sequence: Synthetic peptide
NQVGSLQY

SEQ ID NO: 18293 - protein, 10 aa, Artificial Sequence
  Description of Artificial Sequence: Synthetic peptide
YVDNGTNVTL

SEQ ID NO: 18294 - protein, 8 aa, Artificial Sequence
  Description of Artificial Sequence: Synthetic peptide
DQLIHLYY

SEQ ID NO: 18295 - protein, 10 aa, Artificial Sequence
  Description of Artificial Sequence: Synthetic peptide
FLKKGLGISY

SEQ ID NO: 18296 - protein, 9 aa, Artificial Sequence
  Description of Artificial Sequence: Synthetic peptide
DIEITSHTF

SEQ ID NO: 18297 - protein, 9 aa, Artificial Sequence
  Description of Artificial Sequence: Synthetic peptide
DAYFSVPLY

SEQ ID NO: 18298 - protein, 11 aa, Artificial Sequence
  Description of Artificial Sequence: Synthetic peptide
IPAETGKETAY

SEQ ID NO: 18299 - protein, 9 aa, Artificial Sequence
  Description of Artificial Sequence: Synthetic peptide
DIAGTTSTL

SEQ ID NO: 18300 - protein, 10 aa, Artificial Sequence
  Description of Artificial Sequence: Synthetic peptide
EVNIVTDSQY

SEQ ID NO: 18301 - protein, 9 aa, Artificial Sequence
  Description of Artificial Sequence: Synthetic peptide
HKQVGTLQY

SEQ ID NO: 18302 - protein, 9 aa, Artificial Sequence
  Description of Artificial Sequence: Synthetic peptide
AQNLWVTVY

SEQ ID NO: 18303 - protein, 8 aa, Artificial Sequence
  Description of Artificial Sequence: Synthetic peptide
GQYIYNTY

SEQ ID NO: 18304 - protein, 9 aa, Artificial Sequence
  Description of Artificial Sequence: Synthetic peptide
QKTELQAIY

SEQ ID NO: 18305 - protein, 9 aa, Artificial Sequence
  Description of Artificial Sequence: Synthetic peptide
KQISNIQKF

SEQ ID NO: 18306 - protein, 9 aa, Artificial Sequence
  Description of Artificial Sequence: Synthetic peptide
KQISQIQKF

SEQ ID NO: 18307 - protein, 9 aa, Artificial Sequence
  Description of Artificial Sequence: Synthetic peptide
KQNPEVIIY

SEQ ID NO: 18308 - protein, 9 aa, Artificial Sequence
  Description of Artificial Sequence: Synthetic peptide
SKIGPENPY

SEQ ID NO: 18309 - protein, 9 aa, Artificial Sequence
  Description of Artificial Sequence: Synthetic peptide
IRIGPGQAF

SEQ ID NO: 18310 - protein, 9 aa, Artificial Sequence
  Description of Artificial Sequence: Synthetic peptide
GKKAIGTVL

SEQ ID NO: 18311 - protein, 8 aa, Artificial Sequence
  Description of Artificial Sequence: Synthetic peptide
KKGLGISY

SEQ ID NO: 18312 - protein, 9 aa, Artificial Sequence
  Description of Artificial Sequence: Synthetic peptide
KQNPEMVIY

SEQ ID NO: 18313 - protein, 8 aa, Artificial Sequence
  Description of Artificial Sequence: Synthetic peptide
GQHIYNTY

SEQ ID NO: 18314 - protein, 9 aa, Artificial Sequence
  Description of Artificial Sequence: Synthetic peptide
LKKGLGISY

SEQ ID NO: 18315 - protein, 9 aa, Artificial Sequence
  Description of Artificial Sequence: Synthetic peptide
KQNPEIIIY

SEQ ID NO: 18316 - protein, 9 aa, Artificial Sequence
  Description of Artificial Sequence: Synthetic peptide
KQGQGQWTY

SEQ ID NO: 18317 - protein, 10 aa, Artificial Sequence
  Description of Artificial Sequence: Synthetic peptide
QQIATQLSKY

SEQ ID NO: 18318 - protein, 8 aa, Artificial Sequence
  Description of Artificial Sequence: Synthetic peptide
TKNIIVQF

SEQ ID NO: 18319 - protein, 9 aa, Artificial Sequence
  Description of Artificial Sequence: Synthetic peptide
KQGPDQWTY

SEQ ID NO: 18320 - protein, 8 aa, Artificial Sequence
  Description of Artificial Sequence: Synthetic peptide
AQVQHEKY

SEQ ID NO: 18321 - protein, 8 aa, Artificial Sequence
  Description of Artificial Sequence: Synthetic peptide
KQVGTLQY

SEQ ID NO: 18322 - protein, 9 aa, Artificial Sequence
  Description of Artificial Sequence: Synthetic peptide
VKVVEEKAF

SEQ ID NO: 18323 - protein, 10 aa, Artificial Sequence
  Description of Artificial Sequence: Synthetic peptide
RKQGQGQWTY

SEQ ID NO: 18324 - protein, 9 aa, Artificial Sequence
  Description of Artificial Sequence: Synthetic peptide
TQACPKVSF

SEQ ID NO: 18325 - protein, 9 aa, Artificial Sequence
  Description of Artificial Sequence: Synthetic peptide
THLEGQVIL

SEQ ID NO: 18326 - protein, 9 aa, Artificial Sequence
  Description of Artificial Sequence: Synthetic peptide
IHIGPGQAF

SEQ ID NO: 18327 - protein, 9 aa, Artificial Sequence
  Description of Artificial Sequence: Synthetic peptide
THLEGKVIL

SEQ ID NO: 18328 - protein, 9 aa, Artificial Sequence
  Description of Artificial Sequence: Synthetic peptide
HQAISPRTL

SEQ ID NO: 18329 - protein, 9 aa, Artificial Sequence
  Description of Artificial Sequence: Synthetic peptide
IHSIGERVL

SEQ ID NO: 18330 - protein, 9 aa, Artificial Sequence
  Description of Artificial Sequence: Synthetic peptide
EHLKTAVQM

SEQ ID NO: 18331 - protein, 9 aa, Artificial Sequence
  Description of Artificial Sequence: Synthetic peptide
THLEGKIIL

SEQ ID NO: 18332 - protein, 8 aa, Artificial Sequence
  Description of Artificial Sequence: Synthetic peptide
MHTDIISL

SEQ ID NO: 18333 - protein, 9 aa, Artificial Sequence
  Description of Artificial Sequence: Synthetic peptide
EHLRTAVQM

SEQ ID NO: 18334 - protein, 9 aa, Artificial Sequence
  Description of Artificial Sequence: Synthetic peptide
EQEPPLTSL

SEQ ID NO: 18335 - protein, 9 aa, Artificial Sequence
  Description of Artificial Sequence: Synthetic peptide
GHQAAMQML

SEQ ID NO: 18336 - protein, 9 aa, Artificial Sequence
  Description of Artificial Sequence: Synthetic peptide
IHSISERIL

SEQ ID NO: 18337 - protein, 9 aa, Artificial Sequence
  Description of Artificial Sequence: Synthetic peptide
AHTNDIKQL

SEQ ID NO: 18338 - protein, 9 aa, Artificial Sequence
  Description of Artificial Sequence: Synthetic peptide
IHFGPGQAF

SEQ ID NO: 18339 - protein, 9 aa, Artificial Sequence
  Description of Artificial Sequence: Synthetic peptide
AHTSDVKQL

SEQ ID NO: 18340 - protein, 9 aa, Artificial Sequence
  Description of Artificial Sequence: Synthetic peptide
AHTNDVKQL

SEQ ID NO: 18341 - protein, 8 aa, Artificial Sequence
  Description of Artificial Sequence: Synthetic peptide
LHQVVTQL

SEQ ID NO: 18342 - protein, 8 aa, Artificial Sequence
  Description of Artificial Sequence: Synthetic peptide
THLEGQVI

SEQ ID NO: 18343 - protein, 8 aa, Artificial Sequence
  Description of Artificial Sequence: Synthetic peptide
NHIPKQPL

SEQ ID NO: 18344 - protein, 9 aa, Artificial Sequence
  Description of Artificial Sequence: Synthetic peptide
IHTDNGTNF

SEQ ID NO: 18345 - protein, 10 aa, Artificial Sequence
  Description of Artificial Sequence: Synthetic peptide
NQDPIPKQPL

SEQ ID NO: 18346 - protein, 9 aa, Artificial Sequence
  Description of Artificial Sequence: Synthetic peptide
FQQREAREL

SEQ ID NO: 18347 - protein, 9 aa, Artificial Sequence
  Description of Artificial Sequence: Synthetic peptide
SQIYPGIKV

SEQ ID NO: 18348 - protein, 9 aa, Artificial Sequence
  Description of Artificial Sequence: Synthetic peptide
TNSPTSREL

SEQ ID NO: 18349 - protein, 8 aa, Artificial Sequence
  Description of Artificial Sequence: Synthetic peptide
THLEGKVI

SEQ ID NO: 18350 - protein, 9 aa, Artificial Sequence
  Description of Artificial Sequence: Synthetic peptide
IPVESSTVL

SEQ ID NO: 18351 - protein, 9 aa, Artificial Sequence
  Description of Artificial Sequence: Synthetic peptide
IRIGPGQAF

SEQ ID NO: 18352 - protein, 9 aa, Artificial Sequence
  Description of Artificial Sequence: Synthetic peptide
SQIYPNIKV

SEQ ID NO: 18353 - protein, 9 aa, Artificial Sequence
  Description of Artificial Sequence: Synthetic peptide
SVLDVGGAY

SEQ ID NO: 18354 - protein, 9 aa, Artificial Sequence
  Description of Artificial Sequence: Synthetic peptide
TVLDVGDAY

SEQ ID NO: 18355 - protein, 9 aa, Artificial Sequence
  Description of Artificial Sequence: Synthetic peptide
SVLDVGDAY

SEQ ID NO: 18356 - protein, 10 aa, Artificial Sequence
  Description of Artificial Sequence: Synthetic peptide
VPIDNNSTQY

SEQ ID NO: 18357 - protein, 9 aa, Artificial Sequence
  Description of Artificial Sequence: Synthetic peptide
TINEEAAEW

SEQ ID NO: 18358 - protein, 10 aa, Artificial Sequence
  Description of Artificial Sequence: Synthetic peptide
YVDNGTNVTL

SEQ ID NO: 18359 - protein, 8 aa, Artificial Sequence
  Description of Artificial Sequence: Synthetic peptide
IEIITHSF

SEQ ID NO: 18360 - protein, 8 aa, Artificial Sequence
  Description of Artificial Sequence: Synthetic peptide
IEITSHTF

SEQ ID NO: 18361 - protein, 8 aa, Artificial Sequence
  Description of Artificial Sequence: Synthetic peptide
MENVTESF

SEQ ID NO: 18362 - protein, 8 aa, Artificial Sequence
  Description of Artificial Sequence: Synthetic peptide
LENVTETF

SEQ ID NO: 18363 - protein, 8 aa, Artificial Sequence
  Description of Artificial Sequence: Synthetic peptide
LEVTTHSF

SEQ ID NO: 18364 - protein, 8 aa, Artificial Sequence
  Description of Artificial Sequence: Synthetic peptide
NETPGIRY

SEQ ID NO: 18365 - protein, 11 aa, Artificial Sequence
  Description of Artificial Sequence: Synthetic peptide
LEVNIVTDSQY

SEQ ID NO: 18366 - protein, 8 aa, Artificial Sequence
  Description of Artificial Sequence: Synthetic peptide
PEVIIYQY

SEQ ID NO: 18367 - protein, 9 aa, Artificial Sequence
  Description of Artificial Sequence: Synthetic peptide
SEFNLPPIV

SEQ ID NO: 18368 - protein, 8 aa, Artificial Sequence
  Description of Artificial Sequence: Synthetic peptide
PEIIIYQY

SEQ ID NO: 18369 - protein, 8 aa, Artificial Sequence
  Description of Artificial Sequence: Synthetic peptide
LENVTENF

SEQ ID NO: 18370 - protein, 8 aa, Artificial Sequence
  Description of Artificial Sequence: Synthetic peptide
PEMVIYQY

SEQ ID NO: 18371 - protein, 8 aa, Artificial Sequence
  Description of Artificial Sequence: Synthetic peptide
TEDLQSLY

SEQ ID NO: 18372 - protein, 10 aa, Artificial Sequence
  Description of Artificial Sequence: Synthetic peptide
TEPIVGAETY

SEQ ID NO: 18373 - protein, 8 aa, Artificial Sequence
  Description of Artificial Sequence: Synthetic peptide
MEVRTHSF

SEQ ID NO: 18374 - protein, 9 aa, Artificial Sequence
  Description of Artificial Sequence: Synthetic peptide
DIEITSHTF

SEQ ID NO: 18375 - protein, 8 aa, Artificial Sequence
  Description of Artificial Sequence: Synthetic peptide
VEAIIRTL

SEQ ID NO: 18376 - protein, 9 aa, Artificial Sequence
  Description of Artificial Sequence: Synthetic peptide
ARVLAVERY

SEQ ID NO: 18377 - protein, 10 aa, Artificial Sequence
  Description of Artificial Sequence: Synthetic peptide
IRIGPGQAFY

SEQ ID NO: 18378 - protein, 9 aa, Artificial Sequence
  Description of Artificial Sequence: Synthetic peptide
IRIGPGQAF

SEQ ID NO: 18379 - protein, 10 aa, Artificial Sequence
  Description of Artificial Sequence: Synthetic peptide
VRQGYSPLSF

SEQ ID NO: 18380 - protein, 10 aa, Artificial Sequence
  Description of Artificial Sequence: Synthetic peptide
GGLDGLIYSK

SEQ ID NO: 18381 - protein, 11 aa, Artificial Sequence
  Description of Artificial Sequence: Synthetic peptide
TEAELELEENR

SEQ ID NO: 18382 - protein, 10 aa, Artificial Sequence
  Description of Artificial Sequence: Synthetic peptide
DRNNTNNVTF

SEQ ID NO: 18383 - protein, 11 aa, Artificial Sequence
  Description of Artificial Sequence: Synthetic peptide
EDYNGTNGTNR

SEQ ID NO: 18384 - protein, 10 aa, Artificial Sequence
  Description of Artificial Sequence: Synthetic peptide
IPVDPQEVER

SEQ ID NO: 18385 - protein, 10 aa, Artificial Sequence
  Description of Artificial Sequence: Synthetic peptide
VPVDPQDVEK

SEQ ID NO: 18386 - protein, 11 aa, Artificial Sequence
  Description of Artificial Sequence: Synthetic peptide
KGGLEGLIYSK

SEQ ID NO: 18387 - protein, 9 aa, Artificial Sequence
  Description of Artificial Sequence: Synthetic peptide
HRVSPICDY

SEQ ID NO: 18388 - protein, 10 aa, Artificial Sequence
  Description of Artificial Sequence: Synthetic peptide
GGLEGLVYSK

SEQ ID NO: 18389 - protein, 9 aa, Artificial Sequence
  Description of Artificial Sequence: Synthetic peptide
SRIGPENPY

SEQ ID NO: 18390 - protein, 9 aa, Artificial Sequence
  Description of Artificial Sequence: Synthetic peptide
DGIIVIVQR

SEQ ID NO: 18391 - protein, 9 aa, Artificial Sequence
  Description of Artificial Sequence: Synthetic peptide
ERTGTSFNF

SEQ ID NO: 18392 - protein, 11 aa, Artificial Sequence
  Description of Artificial Sequence: Synthetic peptide
KEAELELAENR

SEQ ID NO: 18393 - protein, 10 aa, Artificial Sequence
  Description of Artificial Sequence: Synthetic peptide
TYYVDGAANR

SEQ ID NO: 18394 - protein, 8 aa, Artificial Sequence
  Description of Artificial Sequence: Synthetic peptide
VAIEIFGK

SEQ ID NO: 18395 - protein, 9 aa, Artificial Sequence
  Description of Artificial Sequence: Synthetic peptide
GLDGLIYSK

SEQ ID NO: 18396 - protein, 9 aa, Artificial Sequence
  Description of Artificial Sequence: Synthetic peptide
VRTVELLGR

SEQ ID NO: 18397 - protein, 11 aa, Artificial Sequence
  Description of Artificial Sequence: Synthetic peptide
KALTDVVPLTK

SEQ ID NO: 18398 - protein, 10 aa, Artificial Sequence
  Description of Artificial Sequence: Synthetic peptide
GHNQVGSLQY

SEQ ID NO: 18399 - protein, 10 aa, Artificial Sequence
  Description of Artificial Sequence: Synthetic peptide
GGLEGLIYSK

SEQ ID NO: 18400 - protein, 8 aa, Artificial Sequence
  Description of Artificial Sequence: Synthetic peptide
TDIIPLTK

SEQ ID NO: 18401 - protein, 11 aa, Artificial Sequence
  Description of Artificial Sequence: Synthetic peptide
TAIAVAEGTDR

SEQ ID NO: 18402 - protein, 10 aa, Artificial Sequence
  Description of Artificial Sequence: Synthetic peptide
TDGIIVIVQR

SEQ ID NO: 18403 - protein, 10 aa, Artificial Sequence
  Description of Artificial Sequence: Synthetic peptide
GALDLSHFLK

SEQ ID NO: 18404 - protein, 11 aa, Artificial Sequence
  Description of Artificial Sequence: Synthetic peptide
QINNYTDEIYR

SEQ ID NO: 18405 - protein, 10 aa, Artificial Sequence
  Description of Artificial Sequence: Synthetic peptide
GAFDLSHFLK

SEQ ID NO: 18406 - protein, 9 aa, Artificial Sequence
  Description of Artificial Sequence: Synthetic peptide
ALTALVTPK

SEQ ID NO: 18407 - protein, 9 aa, Artificial Sequence
  Description of Artificial Sequence: Synthetic peptide
GRAGYVTDR

SEQ ID NO: 18408 - protein, 8 aa, Artificial Sequence
  Description of Artificial Sequence: Synthetic peptide
QRVGQAMY

SEQ ID NO: 18409 - protein, 9 aa, Artificial Sequence
  Description of Artificial Sequence: Synthetic peptide
SRIGIIRQR

SEQ ID NO: 18410 - protein, 9 aa, Artificial Sequence
  Description of Artificial Sequence: Synthetic peptide
SRIGITRQR

SEQ ID NO: 18411 - protein, 9 aa, Artificial Sequence
  Description of Artificial Sequence: Synthetic peptide
GRAGYVTDR

SEQ ID NO: 18412 - protein, 9 aa, Artificial Sequence
  Description of Artificial Sequence: Synthetic peptide
ARVLAVERY

SEQ ID NO: 18413 - protein, 9 aa, Artificial Sequence
  Description of Artificial Sequence: Synthetic peptide
GRQANFLGK

SEQ ID NO: 18414 - protein, 9 aa, Artificial Sequence
  Description of Artificial Sequence: Synthetic peptide
IRIGPGQAF

SEQ ID NO: 18415 - protein, 9 aa, Artificial Sequence
  Description of Artificial Sequence: Synthetic peptide
CRIKQIVNM

SEQ ID NO: 18416 - protein, 9 aa, Artificial Sequence
  Description of Artificial Sequence: Synthetic peptide
GRAIIHIPR

SEQ ID NO: 18417 - protein, 10 aa, Artificial Sequence
  Description of Artificial Sequence: Synthetic peptide
IRIGPGQAFY

SEQ ID NO: 18418 - protein, 8 aa, Artificial Sequence
  Description of Artificial Sequence: Synthetic peptide
ARVKHPEY

SEQ ID NO: 18419 - protein, 9 aa, Artificial Sequence
  Description of Artificial Sequence: Synthetic peptide
QRIDVKDTK

SEQ ID NO: 18420 - protein, 9 aa, Artificial Sequence
  Description of Artificial Sequence: Synthetic peptide
GRPGNFPQK

SEQ ID NO: 18421 - protein, 9 aa, Artificial Sequence
  Description of Artificial Sequence: Synthetic peptide
QRIEVKDTK

SEQ ID NO: 18422 - protein, 9 aa, Artificial Sequence
  Description of Artificial Sequence: Synthetic peptide
SRIGPENPY

SEQ ID NO: 18423 - protein, 9 aa, Artificial Sequence
  Description of Artificial Sequence: Synthetic peptide
EPIEGAETY

SEQ ID NO: 18424 - protein, 9 aa, Artificial Sequence
  Description of Artificial Sequence: Synthetic peptide
EPIAGAETY

SEQ ID NO: 18425 - protein, 10 aa, Artificial Sequence
  Description of Artificial Sequence: Synthetic peptide
VPIDNNSTQY

SEQ ID NO: 18426 - protein, 9 aa, Artificial Sequence
  Description of Artificial Sequence: Synthetic peptide
EPIVGAETY

SEQ ID NO: 18427 - protein, 9 aa, Artificial Sequence
  Description of Artificial Sequence: Synthetic peptide
NASAENYTF

SEQ ID NO: 18428 - protein, 11 aa, Artificial Sequence
  Description of Artificial Sequence: Synthetic peptide
IPAETGQETAY

SEQ ID NO: 18429 - protein, 10 aa, Artificial Sequence
  Description of Artificial Sequence: Synthetic peptide
NPAIPVGDIY

SEQ ID NO: 18430 - protein, 11 aa, Artificial Sequence
  Description of Artificial Sequence: Synthetic peptide
IPAETGKETAY

SEQ ID NO: 18431 - protein, 9 aa, Artificial Sequence
  Description of Artificial Sequence: Synthetic peptide
NPEVIIYQY

SEQ ID NO: 18432 - protein, 9 aa, Artificial Sequence
  Description of Artificial Sequence: Synthetic peptide
NPEIIIYQY

SEQ ID NO: 18433 - protein, 9 aa, Artificial Sequence
  Description of Artificial Sequence: Synthetic peptide
NPEMVIYQY

SEQ ID NO: 18434 - protein, 11 aa, Artificial Sequence
  Description of Artificial Sequence: Synthetic peptide
MPNDTGKNITL

SEQ ID NO: 18435 - protein, 10 aa, Artificial Sequence
  Description of Artificial Sequence: Synthetic peptide
NPSIPVGDIY

SEQ ID NO: 18436 - protein, 11 aa, Artificial Sequence
  Description of Artificial Sequence: Synthetic peptide
EAEPIAGAETY

SEQ ID NO: 18437 - protein, 10 aa, Artificial Sequence
  Description of Artificial Sequence: Synthetic peptide
MVMENVTESF

SEQ ID NO: 18438 - protein, 9 aa, Artificial Sequence
  Description of Artificial Sequence: Synthetic peptide
NITGLILTY

SEQ ID NO: 18439 - protein, 9 aa, Artificial Sequence
  Description of Artificial Sequence: Synthetic peptide
TVLDVGDAY

SEQ ID NO: 18440 - protein, 9 aa, Artificial Sequence
  Description of Artificial Sequence: Synthetic peptide
IPVESSTVL

SEQ ID NO: 18441 - protein, 8 aa, Artificial Sequence
  Description of Artificial Sequence: Synthetic peptide
TPGPGVRY

SEQ ID NO: 18442 - protein, 9 aa, Artificial Sequence
  Description of Artificial Sequence: Synthetic peptide
SPAIFQNSM

SEQ ID NO: 18443 - protein, 10 aa, Artificial Sequence
  Description of Artificial Sequence: Synthetic peptide
EPIEGAETYY

SEQ ID NO: 18444 - protein, 9 aa, Artificial Sequence
  Description of Artificial Sequence: Synthetic peptide
DARLVITTY

SEQ ID NO: 18445 - protein, 9 aa, Artificial Sequence
  Description of Artificial Sequence: Synthetic peptide
SVLDVGDAY

SEQ ID NO: 18446 - protein, 9 aa, Artificial Sequence
  Description of Artificial Sequence: Synthetic peptide
EAMSQMTNM

SEQ ID NO: 18447 - protein, 9 aa, Artificial Sequence
  Description of Artificial Sequence: Synthetic peptide
DPNPQEMVM

SEQ ID NO: 18448 - protein, 10 aa, Artificial Sequence
  Description of Artificial Sequence: Synthetic peptide
EPIAGAETYY

SEQ ID NO: 18449 - protein, 10 aa, Artificial Sequence
  Description of Artificial Sequence: Synthetic peptide
MVLENVTETF

SEQ ID NO: 18450 - protein, 10 aa, Artificial Sequence
  Description of Artificial Sequence: Synthetic peptide
TAATNPDVAW

SEQ ID NO: 18451 - protein, 10 aa, Artificial Sequence
  Description of Artificial Sequence: Synthetic peptide
NPPIPVGDIY

SEQ ID NO: 18452 - protein, 9 aa, Artificial Sequence
  Description of Artificial Sequence: Synthetic peptide
EARLVITTY

SEQ ID NO: 18453 - protein, 9 aa, Artificial Sequence
  Description of Artificial Sequence: Synthetic peptide
SPAIFQSSM

SEQ ID NO: 18454 - protein, 9 aa, Artificial Sequence
  Description of Artificial Sequence: Synthetic peptide
DAYFSVPLY

SEQ ID NO: 18455 - protein, 9 aa, Artificial Sequence
  Description of Artificial Sequence: Synthetic peptide
IPLTTEAEL

SEQ ID NO: 18456 - protein, 9 aa, Artificial Sequence
  Description of Artificial Sequence: Synthetic peptide
PPIPVGDIY

SEQ ID NO: 18457 - protein, 10 aa, Artificial Sequence
  Description of Artificial Sequence: Synthetic peptide
APFREQNPEM

SEQ ID NO: 18458 - protein, 8 aa, Artificial Sequence
  Description of Artificial Sequence: Synthetic peptide
TPGPGEGY

SEQ ID NO: 18459 - protein, 10 aa, Artificial Sequence
  Description of Artificial Sequence: Synthetic peptide
EPIVGAETYY

SEQ ID NO: 18460 - protein, 8 aa, Artificial Sequence
  Description of Artificial Sequence: Synthetic peptide
TPGPGERY

SEQ ID NO: 18461 - protein, 9 aa, Artificial Sequence
  Description of Artificial Sequence: Synthetic peptide
NITGLILTF

SEQ ID NO: 18462 - protein, 9 aa, Artificial Sequence
  Description of Artificial Sequence: Synthetic peptide
IPLTKEAEL

SEQ ID NO: 18463 - protein, 9 aa, Artificial Sequence
  Description of Artificial Sequence: Synthetic peptide
FPISPIETV

SEQ ID NO: 18464 - protein, 11 aa, Artificial Sequence
  Description of Artificial Sequence: Synthetic peptide
MPNDTGKNITL

SEQ ID NO: 18465 - protein, 9 aa, Artificial Sequence
  Description of Artificial Sequence: Synthetic peptide
DPNPQEMVM

SEQ ID NO: 18466 - protein, 9 aa, Artificial Sequence
  Description of Artificial Sequence: Synthetic peptide
IPLTTEAEL

SEQ ID NO: 18467 - protein, 9 aa, Artificial Sequence
  Description of Artificial Sequence: Synthetic peptide
DPSPQEMVL

SEQ ID NO: 18468 - protein, 9 aa, Artificial Sequence
  Description of Artificial Sequence: Synthetic peptide
DPNPQEMVL

SEQ ID NO: 18469 - protein, 9 aa, Artificial Sequence
  Description of Artificial Sequence: Synthetic peptide
QPDKSESEL

SEQ ID NO: 18470 - protein, 9 aa, Artificial Sequence
  Description of Artificial Sequence: Synthetic peptide
TADGCQQIL

SEQ ID NO: 18471 - protein, 9 aa, Artificial Sequence
  Description of Artificial Sequence: Synthetic peptide
NASAENYTF

SEQ ID NO: 18472 - protein, 9 aa, Artificial Sequence
  Description of Artificial Sequence: Synthetic peptide
IPLTKEAEL

SEQ ID NO: 18473 - protein, 9 aa, Artificial Sequence
  Description of Artificial Sequence: Synthetic peptide
IPVESSTVL

SEQ ID NO: 18474 - protein, 9 aa, Artificial Sequence
  Description of Artificial Sequence: Synthetic peptide
VPLTKEAEL

SEQ ID NO: 18475 - protein, 9 aa, Artificial Sequence
  Description of Artificial Sequence: Synthetic peptide
YSTQVDPDL

SEQ ID NO: 18476 - protein, 9 aa, Artificial Sequence
  Description of Artificial Sequence: Synthetic peptide
YSTQIDPDL

SEQ ID NO: 18477 - protein, 10 aa, Artificial Sequence
  Description of Artificial Sequence: Synthetic peptide
YVDNGTNVTL

SEQ ID NO: 18478 - protein, 9 aa, Artificial Sequence
  Description of Artificial Sequence: Synthetic peptide
YSTQVDPGL

SEQ ID NO: 18479 - protein, 9 aa, Artificial Sequence
  Description of Artificial Sequence: Synthetic peptide
TPSPKQEQL

SEQ ID NO: 18480 - protein, 9 aa, Artificial Sequence
  Description of Artificial Sequence: Synthetic peptide
YSTQVEPGL

SEQ ID NO: 18481 - protein, 9 aa, Artificial Sequence
  Description of Artificial Sequence: Synthetic peptide
LPISPIETV

SEQ ID NO: 18482 - protein, 9 aa, Artificial Sequence
  Description of Artificial Sequence: Synthetic peptide
FPISPIETV

SEQ ID NO: 18483 - protein, 9 aa, Artificial Sequence
  Description of Artificial Sequence: Synthetic peptide
IPVESSTVL

SEQ ID NO: 18484 - protein, 11 aa, Artificial Sequence
  Description of Artificial Sequence: Synthetic peptide
MPNDTGKNITL

SEQ ID NO: 18485 - protein, 9 aa, Artificial Sequence
  Description of Artificial Sequence: Synthetic peptide
IPLTTEAEL

SEQ ID NO: 18486 - protein, 9 aa, Artificial Sequence
  Description of Artificial Sequence: Synthetic peptide
IPLTKEAEL

SEQ ID NO: 18487 - protein, 10 aa, Artificial Sequence
  Description of Artificial Sequence: Synthetic peptide
SPIETVPVTL

SEQ ID NO: 18488 - protein, 9 aa, Artificial Sequence
  Description of Artificial Sequence: Synthetic peptide
VPLTKEAEL

SEQ ID NO: 18489 - protein, 9 aa, Artificial Sequence
  Description of Artificial Sequence: Synthetic peptide
DPNPQEMVM

SEQ ID NO: 18490 - protein, 9 aa, Artificial Sequence
  Description of Artificial Sequence: Synthetic peptide
TPSPKQEQL

SEQ ID NO: 18491 - protein, 9 aa, Artificial Sequence
  Description of Artificial Sequence: Synthetic peptide
DPNPQEMVL

SEQ ID NO: 18492 - protein, 9 aa, Artificial Sequence
  Description of Artificial Sequence: Synthetic peptide
TADGCQQIL

SEQ ID NO: 18493 - protein, 9 aa, Artificial Sequence
  Description of Artificial Sequence: Synthetic peptide
FPISPIETV

SEQ ID NO: 18494 - protein, 9 aa, Artificial Sequence
  Description of Artificial Sequence: Synthetic peptide
DPSPQEMVL

SEQ ID NO: 18495 - protein, 9 aa, Artificial Sequence
  Description of Artificial Sequence: Synthetic peptide
NASAENYTF

SEQ ID NO: 18496 - protein, 11 aa, Artificial Sequence
  Description of Artificial Sequence: Synthetic peptide
IPLTTEAELEL

SEQ ID NO: 18497 - protein, 9 aa, Artificial Sequence
  Description of Artificial Sequence: Synthetic peptide
LPISPIETV

SEQ ID NO: 18498 - protein, 9 aa, Artificial Sequence
  Description of Artificial Sequence: Synthetic peptide
YSTQVDPDL

SEQ ID NO: 18499 - protein, 9 aa, Artificial Sequence
  Description of Artificial Sequence: Synthetic peptide
YSTQIDPDL

SEQ ID NO: 18500 - protein, 9 aa, Artificial Sequence
  Description of Artificial Sequence: Synthetic peptide
TPQDLNAML

SEQ ID NO: 18501 - protein, 9 aa, Artificial Sequence
  Description of Artificial Sequence: Synthetic peptide
YSTQVDPGL

SEQ ID NO: 18502 - protein, 9 aa, Artificial Sequence
  Description of Artificial Sequence: Synthetic peptide
IVTDSQYAL

SEQ ID NO: 18503 - protein, 10 aa, Artificial Sequence
  Description of Artificial Sequence: Synthetic peptide
SPIETVPVKL

SEQ ID NO: 18504 - protein, 10 aa, Artificial Sequence
  Description of Artificial Sequence: Synthetic peptide
YVDNGTNVTL

SEQ ID NO: 18505 - protein, 9 aa, Artificial Sequence
  Description of Artificial Sequence: Synthetic peptide
SPAIFQNSM

SEQ ID NO: 18506 - protein, 10 aa, Artificial Sequence
  Description of Artificial Sequence: Synthetic peptide
VPTDPSPQEM

SEQ ID NO: 18507 - protein, 10 aa, Artificial Sequence
  Description of Artificial Sequence: Synthetic peptide
NANPDCKTIL

SEQ ID NO: 18508 - protein, 9 aa, Artificial Sequence
  Description of Artificial Sequence: Synthetic peptide
TSSPSANEL

SEQ ID NO: 18509 - protein, 11 aa, Artificial Sequence
  Description of Artificial Sequence: Synthetic peptide
IPLTKEAELEL

SEQ ID NO: 18510 - protein, 10 aa, Artificial Sequence
  Description of Artificial Sequence: Synthetic peptide
APFREQNPEM

SEQ ID NO: 18511 - protein, 10 aa, Artificial Sequence
  Description of Artificial Sequence: Synthetic peptide
VPTDPNPQEM

SEQ ID NO: 18512 - protein, 9 aa, Artificial Sequence
  Description of Artificial Sequence: Synthetic peptide
YPNIKVKQL

SEQ ID NO: 18513 - protein, 9 aa, Artificial Sequence
  Description of Artificial Sequence: Synthetic peptide
QPDKSESEL

SEQ ID NO: 18514 - protein, 11 aa, Artificial Sequence
  Description of Artificial Sequence: Synthetic peptide
IPAETGKETAY

SEQ ID NO: 18515 - protein, 11 aa, Artificial Sequence
  Description of Artificial Sequence: Synthetic peptide
IPAETGQETAY

SEQ ID NO: 18516 - protein, 9 aa, Artificial Sequence
  Description of Artificial Sequence: Synthetic peptide
EPIEGAETY

SEQ ID NO: 18517 - protein, 9 aa, Artificial Sequence
  Description of Artificial Sequence: Synthetic peptide
EPIAGAETY

SEQ ID NO: 18518 - protein, 9 aa, Artificial Sequence
  Description of Artificial Sequence: Synthetic peptide
NASAENYTF

SEQ ID NO: 18519 - protein, 9 aa, Artificial Sequence
  Description of Artificial Sequence: Synthetic peptide
EPIVGAETY

SEQ ID NO: 18520 - protein, 10 aa, Artificial Sequence
  Description of Artificial Sequence: Synthetic peptide
NPAIPVGDIY

SEQ ID NO: 18521 - protein, 10 aa, Artificial Sequence
  Description of Artificial Sequence: Synthetic peptide
VPIDNNSTQY

SEQ ID NO: 18522 - protein, 10 aa, Artificial Sequence
  Description of Artificial Sequence: Synthetic peptide
NPSIPVGDIY

SEQ ID NO: 18523 - protein, 11 aa, Artificial Sequence
  Description of Artificial Sequence: Synthetic peptide
EAEPIAGAETY

SEQ ID NO: 18524 - protein, 9 aa, Artificial Sequence
  Description of Artificial Sequence: Synthetic peptide
NPEVIIYQY

SEQ ID NO: 18525 - protein, 9 aa, Artificial Sequence
  Description of Artificial Sequence: Synthetic peptide
DPNPQEMVM

SEQ ID NO: 18526 - protein, 11 aa, Artificial Sequence
  Description of Artificial Sequence: Synthetic peptide
MPNDTGKNITL

SEQ ID NO: 18527 - protein, 10 aa, Artificial Sequence
  Description of Artificial Sequence: Synthetic peptide
MVMENVTESF

SEQ ID NO: 18528 - protein, 10 aa, Artificial Sequence
  Description of Artificial Sequence: Synthetic peptide
NPPIPVGDIY

SEQ ID NO: 18529 - protein, 9 aa, Artificial Sequence
  Description of Artificial Sequence: Synthetic peptide
NPEIIIYQY

SEQ ID NO: 18530 - protein, 10 aa, Artificial Sequence
  Description of Artificial Sequence: Synthetic peptide
EPIEGAETYY

SEQ ID NO: 18531 - protein, 9 aa, Artificial Sequence
  Description of Artificial Sequence: Synthetic peptide
NPEMVIYQY

SEQ ID NO: 18532 - protein, 9 aa, Artificial Sequence
  Description of Artificial Sequence: Synthetic peptide
IPLTTEAEL

SEQ ID NO: 18533 - protein, 9 aa, Artificial Sequence
  Description of Artificial Sequence: Synthetic peptide
IPLTKEAEL

SEQ ID NO: 18534 - protein, 10 aa, Artificial Sequence
  Description of Artificial Sequence: Synthetic peptide
EPIAGAETYY

SEQ ID NO: 18535 - protein, 9 aa, Artificial Sequence
  Description of Artificial Sequence: Synthetic peptide
PPIPVGDIY

SEQ ID NO: 18536 - protein, 8 aa, Artificial Sequence
  Description of Artificial Sequence: Synthetic peptide
TPGPGVRY

SEQ ID NO: 18537 - protein, 9 aa, Artificial Sequence
  Description of Artificial Sequence: Synthetic peptide
TVLDVGDAY

SEQ ID NO: 18538 - protein, 9 aa, Artificial Sequence
  Description of Artificial Sequence: Synthetic peptide
IPVESSTVL

SEQ ID NO: 18539 - protein, 11 aa, Artificial Sequence
  Description of Artificial Sequence: Synthetic peptide
MPNDTGKNITL

SEQ ID NO: 18540 - protein, 9 aa, Artificial Sequence
  Description of Artificial Sequence: Synthetic peptide
DPNPQEMVM

SEQ ID NO: 18541 - protein, 9 aa, Artificial Sequence
  Description of Artificial Sequence: Synthetic peptide
IPLTKEAEL

SEQ ID NO: 18542 - protein, 9 aa, Artificial Sequence
  Description of Artificial Sequence: Synthetic peptide
IPLTTEAEL

SEQ ID NO: 18543 - protein, 9 aa, Artificial Sequence
  Description of Artificial Sequence: Synthetic peptide
DPSPQEMVL

SEQ ID NO: 18544 - protein, 9 aa, Artificial Sequence
  Description of Artificial Sequence: Synthetic peptide
DPNPQEMVL

SEQ ID NO: 18545 - protein, 9 aa, Artificial Sequence
  Description of Artificial Sequence: Synthetic peptide
VPLTKEAEL

SEQ ID NO: 18546 - protein, 9 aa, Artificial Sequence
  Description of Artificial Sequence: Synthetic peptide
IPVESSTVL

SEQ ID NO: 18547 - protein, 9 aa, Artificial Sequence
  Description of Artificial Sequence: Synthetic peptide
QPDKSESEL

SEQ ID NO: 18548 - protein, 9 aa, Artificial Sequence
  Description of Artificial Sequence: Synthetic peptide
NASAENYTF

SEQ ID NO: 18549 - protein, 9 aa, Artificial Sequence
  Description of Artificial Sequence: Synthetic peptide
TADGCQQIL

SEQ ID NO: 18550 - protein, 9 aa, Artificial Sequence
  Description of Artificial Sequence: Synthetic peptide
TPSPKQEQL

SEQ ID NO: 18551 - protein, 9 aa, Artificial Sequence
  Description of Artificial Sequence: Synthetic peptide
YSTQVDPDL

SEQ ID NO: 18552 - protein, 9 aa, Artificial Sequence
  Description of Artificial Sequence: Synthetic peptide
YSTQIDPDL

SEQ ID NO: 18553 - protein, 10 aa, Artificial Sequence
  Description of Artificial Sequence: Synthetic peptide
YVDNGTNVTL

SEQ ID NO: 18554 - protein, 10 aa, Artificial Sequence
  Description of Artificial Sequence: Synthetic peptide
SPIETVPVTL

SEQ ID NO: 18555 - protein, 11 aa, Artificial Sequence
  Description of Artificial Sequence: Synthetic peptide
IPLTTEAELEL

SEQ ID NO: 18556 - protein, 9 aa, Artificial Sequence
  Description of Artificial Sequence: Synthetic peptide
LPISPIETV

SEQ ID NO: 18557 - protein, 8 aa, Artificial Sequence
  Description of Artificial Sequence: Synthetic peptide
DPDLADQL

SEQ ID NO: 18558 - protein, 9 aa, Artificial Sequence
  Description of Artificial Sequence: Synthetic peptide
FPISPIETV

SEQ ID NO: 18559 - protein, 9 aa, Artificial Sequence
  Description of Artificial Sequence: Synthetic peptide
YSTQVDPGL

SEQ ID NO: 18560 - protein, 8 aa, Artificial Sequence
  Description of Artificial Sequence: Synthetic peptide
IPVGDARL

SEQ ID NO: 18561 - protein, 9 aa, Artificial Sequence
  Description of Artificial Sequence: Synthetic peptide
AEWDRVHPV

SEQ ID NO: 18562 - protein, 8 aa, Artificial Sequence
  Description of Artificial Sequence: Synthetic peptide
IEIITHSF

SEQ ID NO: 18563 - protein, 8 aa, Artificial Sequence
  Description of Artificial Sequence: Synthetic peptide
MENVTESF

SEQ ID NO: 18564 - protein, 8 aa, Artificial Sequence
  Description of Artificial Sequence: Synthetic peptide
IEITSHTF

SEQ ID NO: 18565 - protein, 10 aa, Artificial Sequence
  Description of Artificial Sequence: Synthetic peptide
GDMEVRTHSF

SEQ ID NO: 18566 - protein, 9 aa, Artificial Sequence
  Description of Artificial Sequence: Synthetic peptide
AEWDRTHPV

SEQ ID NO: 18567 - protein, 8 aa, Artificial Sequence
  Description of Artificial Sequence: Synthetic peptide
AEHLKTAV

SEQ ID NO: 18568 - protein, 8 aa, Artificial Sequence
  Description of Artificial Sequence: Synthetic peptide
LENVTETF

SEQ ID NO: 18569 - protein, 8 aa, Artificial Sequence
  Description of Artificial Sequence: Synthetic peptide
YDSPHPRI

SEQ ID NO: 18570 - protein, 8 aa, Artificial Sequence
  Description of Artificial Sequence: Synthetic peptide
LENVTENF

SEQ ID NO: 18571 - protein, 9 aa, Artificial Sequence
  Description of Artificial Sequence: Synthetic peptide
YEPEKHNVW

SEQ ID NO: 18572 - protein, 8 aa, Artificial Sequence
  Description of Artificial Sequence: Synthetic peptide
AEHLRTAV

SEQ ID NO: 18573 - protein, 9 aa, Artificial Sequence
  Description of Artificial Sequence: Synthetic peptide
IHTDNGTNF

SEQ ID NO: 18574 - protein, 9 aa, Artificial Sequence
  Description of Artificial Sequence: Synthetic peptide
THLEGQVIL

SEQ ID NO: 18575 - protein, 9 aa, Artificial Sequence
  Description of Artificial Sequence: Synthetic peptide
IHIGPGQAF

SEQ ID NO: 18576 - protein, 9 aa, Artificial Sequence
  Description of Artificial Sequence: Synthetic peptide
IHTDNGSNF

SEQ ID NO: 18577 - protein, 11 aa, Artificial Sequence
  Description of Artificial Sequence: Synthetic peptide
TQVDPGLADQL

SEQ ID NO: 18578 - protein, 10 aa, Artificial Sequence
  Description of Artificial Sequence: Synthetic peptide
YVDNGTNVTL

SEQ ID NO: 18579 - protein, 9 aa, Artificial Sequence
  Description of Artificial Sequence: Synthetic peptide
THLEGKVIL

SEQ ID NO: 18580 - protein, 11 aa, Artificial Sequence
  Description of Artificial Sequence: Synthetic peptide
TQIDPDLADQL

SEQ ID NO: 18581 - protein, 11 aa, Artificial Sequence
  Description of Artificial Sequence: Synthetic peptide
TQVEPGLADQL

SEQ ID NO: 18582 - protein, 11 aa, Artificial Sequence
  Description of Artificial Sequence: Synthetic peptide
TQVDPDLADQL

SEQ ID NO: 18583 - protein, 9 aa, Artificial Sequence
  Description of Artificial Sequence: Synthetic peptide
TQDFWEVQL

SEQ ID NO: 18584 - protein, 9 aa, Artificial Sequence
  Description of Artificial Sequence: Synthetic peptide
AHTNDIKQL

SEQ ID NO: 18585 - protein, 9 aa, Artificial Sequence
  Description of Artificial Sequence: Synthetic peptide
IHFGPGQAF

SEQ ID NO: 18586 - protein, 9 aa, Artificial Sequence
  Description of Artificial Sequence: Synthetic peptide
AHTSDVKQL

SEQ ID NO: 18587 - protein, 9 aa, Artificial Sequence
  Description of Artificial Sequence: Synthetic peptide
GHQAAMQML

SEQ ID NO: 18588 - protein, 9 aa, Artificial Sequence
  Description of Artificial Sequence: Synthetic peptide
IRIGPGQAF

SEQ ID NO: 18589 - protein, 9 aa, Artificial Sequence
  Description of Artificial Sequence: Synthetic peptide
EQEPPLTSL

SEQ ID NO: 18590 - protein, 10 aa, Artificial Sequence
  Description of Artificial Sequence: Synthetic peptide
NQDPIPKQPL

SEQ ID NO: 18591 - protein, 9 aa, Artificial Sequence
  Description of Artificial Sequence: Synthetic peptide
THLEGKIIL

SEQ ID NO: 18592 - protein, 9 aa, Artificial Sequence
  Description of Artificial Sequence: Synthetic peptide
AHTNDVKQL

SEQ ID NO: 18593 - protein, 9 aa, Artificial Sequence
  Description of Artificial Sequence: Synthetic peptide
EHLKTAVQM

SEQ ID NO: 18594 - protein, 11 aa, Artificial Sequence
  Description of Artificial Sequence: Synthetic peptide
GHNQVGSLQYL

SEQ ID NO: 18595 - protein, 9 aa, Artificial Sequence
  Description of Artificial Sequence: Synthetic peptide
QDSGLEVNI

SEQ ID NO: 18596 - protein, 9 aa, Artificial Sequence
  Description of Artificial Sequence: Synthetic peptide
SLFGSDPLL

SEQ ID NO: 18597 - protein, 10 aa, Artificial Sequence
  Description of Artificial Sequence: Synthetic peptide
TEDITGNITL

SEQ ID NO: 18598 - protein, 9 aa, Artificial Sequence
  Description of Artificial Sequence: Synthetic peptide
QESGPEVNI

SEQ ID NO: 18599 - protein, 9 aa, Artificial Sequence
  Description of Artificial Sequence: Synthetic peptide
IHSIGERVL

SEQ ID NO: 18600 - protein, 9 aa, Artificial Sequence
  Description of Artificial Sequence: Synthetic peptide
THLEGQVIL

SEQ ID NO: 18601 - protein, 11 aa, Artificial Sequence
  Description of Artificial Sequence: Synthetic peptide
TQIDPDLADQL

SEQ ID NO: 18602 - protein, 11 aa, Artificial Sequence
  Description of Artificial Sequence: Synthetic peptide
TQVDPGLADQL

SEQ ID NO: 18603 - protein, 9 aa, Artificial Sequence
  Description of Artificial Sequence: Synthetic peptide
GRPPEPVTL

SEQ ID NO: 18604 - protein, 10 aa, Artificial Sequence
  Description of Artificial Sequence: Synthetic peptide
NQDPIPKQPL

SEQ ID NO: 18605 - protein, 9 aa, Artificial Sequence
  Description of Artificial Sequence: Synthetic peptide
THLEGKVIL

SEQ ID NO: 18606 - protein, 9 aa, Artificial Sequence
  Description of Artificial Sequence: Synthetic peptide
EHLKTAVQM

SEQ ID NO: 18607 - protein, 9 aa, Artificial Sequence
  Description of Artificial Sequence: Synthetic peptide
IHTDNGTNF

SEQ ID NO: 18608 - protein, 8 aa, Artificial Sequence
  Description of Artificial Sequence: Synthetic peptide
MHTDIISL

SEQ ID NO: 18609 - protein, 10 aa, Artificial Sequence
  Description of Artificial Sequence: Synthetic peptide
YVDNGTNVTL

SEQ ID NO: 18610 - protein, 10 aa, Artificial Sequence
  Description of Artificial Sequence: Synthetic peptide
DRNNTNNVTF

SEQ ID NO: 18611 - protein, 11 aa, Artificial Sequence
  Description of Artificial Sequence: Synthetic peptide
TQVEPGLADQL

SEQ ID NO: 18612 - protein, 9 aa, Artificial Sequence
  Description of Artificial Sequence: Synthetic peptide
IHIGPGQAF

SEQ ID NO: 18613 - protein, 9 aa, Artificial Sequence
  Description of Artificial Sequence: Synthetic peptide
EQEPPLTSL

SEQ ID NO: 18614 - protein, 9 aa, Artificial Sequence
  Description of Artificial Sequence: Synthetic peptide
IRIGPGQAF

SEQ ID NO: 18615 - protein, 11 aa, Artificial Sequence
  Description of Artificial Sequence: Synthetic peptide
TQVDPDLADQL

SEQ ID NO: 18616 - protein, 9 aa, Artificial Sequence
  Description of Artificial Sequence: Synthetic peptide
IHTDNGSNF

SEQ ID NO: 18617 - protein, 9 aa, Artificial Sequence
  Description of Artificial Sequence: Synthetic peptide
EDITGNITL

SEQ ID NO: 18618 - protein, 9 aa, Artificial Sequence
  Description of Artificial Sequence: Synthetic peptide
HQAISPRTL

SEQ ID NO: 18619 - protein, 9 aa, Artificial Sequence
  Description of Artificial Sequence: Synthetic peptide
QGASIEEMM

SEQ ID NO: 18620 - protein, 9 aa, Artificial Sequence
  Description of Artificial Sequence: Synthetic peptide
SRLAFTHTA

SEQ ID NO: 18621 - protein, 8 aa, Artificial Sequence
  Description of Artificial Sequence: Synthetic peptide
GQVILVAV

SEQ ID NO: 18622 - protein, 9 aa, Artificial Sequence
  Description of Artificial Sequence: Synthetic peptide
QRTQQAPAA

SEQ ID NO: 18623 - protein, 10 aa, Artificial Sequence
  Description of Artificial Sequence: Synthetic peptide
SQYALGIIQA

SEQ ID NO: 18624 - protein, 8 aa, Artificial Sequence
  Description of Artificial Sequence: Synthetic peptide
WQRPIVTV

SEQ ID NO: 18625 - protein, 9 aa, Artificial Sequence
  Description of Artificial Sequence: Synthetic peptide
VQLGIPHPA

SEQ ID NO: 18626 - protein, 9 aa, Artificial Sequence
  Description of Artificial Sequence: Synthetic peptide
GHLNLGYVA

SEQ ID NO: 18627 - protein, 8 aa, Artificial Sequence
  Description of Artificial Sequence: Synthetic peptide
THGIKPVV

SEQ ID NO: 18628 - protein, 8 aa, Artificial Sequence
  Description of Artificial Sequence: Synthetic peptide
THGIRPVV

SEQ ID NO: 18629 - protein, 10 aa, Artificial Sequence
  Description of Artificial Sequence: Synthetic peptide
NHPGSQPQTA

SEQ ID NO: 18630 - protein, 8 aa, Artificial Sequence
  Description of Artificial Sequence: Synthetic peptide
FQTLTPNA

SEQ ID NO: 18631 - protein, 9 aa, Artificial Sequence
  Description of Artificial Sequence: Synthetic peptide
ERIRQTEPA

SEQ ID NO: 18632 - protein, 9 aa, Artificial Sequence
  Description of Artificial Sequence: Synthetic peptide
QNYPIVQNA

SEQ ID NO: 18633 - protein, 8 aa, Artificial Sequence
  Description of Artificial Sequence: Synthetic peptide
VHIPLGEA

SEQ ID NO: 18634 - protein, 8 aa, Artificial Sequence
  Description of Artificial Sequence: Synthetic peptide
IQRIIEGA

SEQ ID NO: 18635 - protein, 9 aa, Artificial Sequence
  Description of Artificial Sequence: Synthetic peptide
YQLETEPIA

SEQ ID NO: 18636 - protein, 11 aa, Artificial Sequence
  Description of Artificial Sequence: Synthetic peptide
THLEGQVILVA

SEQ ID NO: 18637 - protein, 8 aa, Artificial Sequence
  Description of Artificial Sequence: Synthetic peptide
WQRPLVTV

SEQ ID NO: 18638 - protein, 8 aa, Artificial Sequence
  Description of Artificial Sequence: Synthetic peptide
DQVAIEIC

SEQ ID NO: 18639 - protein, 9 aa, Artificial Sequence
  Description of Artificial Sequence: Synthetic peptide
SQMTNMNTA

SEQ ID NO: 18640 - protein, 8 aa, Artificial Sequence
  Description of Artificial Sequence: Synthetic peptide
THLEGQVI

SEQ ID NO: 18641 - protein, 8 aa, Artificial Sequence
  Description of Artificial Sequence: Synthetic peptide
HHYESTNP

SEQ ID NO: 18642 - protein, 9 aa, Artificial Sequence
  Description of Artificial Sequence: Synthetic peptide
GHLTFGYVA

SEQ ID NO: 18643 - protein, 9 aa, Artificial Sequence
  Description of Artificial Sequence: Synthetic peptide
SRLALTHLA

SEQ ID NO: 18644 - protein, 8 aa, Artificial Sequence
  Description of Artificial Sequence: Synthetic peptide
QHMLQLTV

SEQ ID NO: 18645 - protein, 8 aa, Artificial Sequence
  Description of Artificial Sequence: Synthetic peptide
TQYRLINC

SEQ ID NO: 18646 - protein, 9 aa, Artificial Sequence
  Description of Artificial Sequence: Synthetic peptide
YQLEAEPIA

SEQ ID NO: 18647 - protein, 8 aa, Artificial Sequence
  Description of Artificial Sequence: Synthetic peptide
GKVILVAV

SEQ ID NO: 18648 - protein, 9 aa, Artificial Sequence
  Description of Artificial Sequence: Synthetic peptide
QRVGQAMYA

SEQ ID NO: 18649 - protein, 8 aa, Artificial Sequence
  Description of Artificial Sequence: Synthetic peptide
MHTDIISL

SEQ ID NO: 18650 - protein, 9 aa, Artificial Sequence
  Description of Artificial Sequence: Synthetic peptide
SQVTNTNTA

SEQ ID NO: 18651 - protein, 8 aa, Artificial Sequence
  Description of Artificial Sequence: Synthetic peptide
LHQVVTQL

SEQ ID NO: 18652 - protein, 9 aa, Artificial Sequence
  Description of Artificial Sequence: Synthetic peptide
SQVTNANAA

SEQ ID NO: 18653 - protein, 8 aa, Artificial Sequence
  Description of Artificial Sequence: Synthetic peptide
SQVTNASA

SEQ ID NO: 18654 - protein, 10 aa, Artificial Sequence
  Description of Artificial Sequence: Synthetic peptide
TEDITGNITL

SEQ ID NO: 18655 - protein, 9 aa, Artificial Sequence
  Description of Artificial Sequence: Synthetic peptide
GEGSPQISL

SEQ ID NO: 18656 - protein, 10 aa, Artificial Sequence
  Description of Artificial Sequence: Synthetic peptide
KEQEPPLTSL

SEQ ID NO: 18657 - protein, 10 aa, Artificial Sequence
  Description of Artificial Sequence: Synthetic peptide
IEVQDTSEAL

SEQ ID NO: 18658 - protein, 9 aa, Artificial Sequence
  Description of Artificial Sequence: Synthetic peptide
IEDPEREVL

SEQ ID NO: 18659 - protein, 9 aa, Artificial Sequence
  Description of Artificial Sequence: Synthetic peptide
MEDDGREVL

SEQ ID NO: 18660 - protein, 10 aa, Artificial Sequence
  Description of Artificial Sequence: Synthetic peptide
IEVKDTKEAL

SEQ ID NO: 18661 - protein, 10 aa, Artificial Sequence
  Description of Artificial Sequence: Synthetic peptide
TETTNQKTEL

SEQ ID NO: 18662 - protein, 9 aa, Artificial Sequence
  Description of Artificial Sequence: Synthetic peptide
MEDEEKEVL

SEQ ID NO: 18663 - protein, 10 aa, Artificial Sequence
  Description of Artificial Sequence: Synthetic peptide
MEDDGREVLM

SEQ ID NO: 18664 - protein, 9 aa, Artificial Sequence
  Description of Artificial Sequence: Synthetic peptide
IEGQLKEAL

SEQ ID NO: 18665 - protein, 10 aa, Artificial Sequence
  Description of Artificial Sequence: Synthetic peptide
AEGTDRIIEL

SEQ ID NO: 18666 - protein, 8 aa, Artificial Sequence
  Description of Artificial Sequence: Synthetic peptide
IETVPVTL

SEQ ID NO: 18667 - protein, 10 aa, Artificial Sequence
  Description of Artificial Sequence: Synthetic peptide
KEKEPPLTSL

SEQ ID NO: 18668 - protein, 9 aa, Artificial Sequence
  Description of Artificial Sequence: Synthetic peptide
SEGATPQDL

SEQ ID NO: 18669 - protein, 8 aa, Artificial Sequence
  Description of Artificial Sequence: Synthetic peptide
IETVPVKL

SEQ ID NO: 18670 - protein, 10 aa, Artificial Sequence
  Description of Artificial Sequence: Synthetic peptide
QELKNSAISL

SEQ ID NO: 18671 - protein, 9 aa, Artificial Sequence
  Description of Artificial Sequence: Synthetic peptide
MEDEEGEVL

SEQ ID NO: 18672 - protein, 9 aa, Artificial Sequence
  Description of Artificial Sequence: Synthetic peptide
IEGQLREAL

SEQ ID NO: 18673 - protein, 9 aa, Artificial Sequence
  Description of Artificial Sequence: Synthetic peptide
QEQNEQDLL

SEQ ID NO: 18674 - protein, 8 aa, Artificial Sequence
  Description of Artificial Sequence: Synthetic peptide
AEGQGTSL

SEQ ID NO: 18675 - protein, 9 aa, Artificial Sequence
  Description of Artificial Sequence: Synthetic peptide
QEKNEQDLL

SEQ ID NO: 18676 - protein, 10 aa, Artificial Sequence
  Description of Artificial Sequence: Synthetic peptide
SESAIRGAIL

SEQ ID NO: 18677 - protein, 10 aa, Artificial Sequence
  Description of Artificial Sequence: Synthetic peptide
IEDPEREVLM

SEQ ID NO: 18678 - protein, 9 aa, Artificial Sequence
  Description of Artificial Sequence: Synthetic peptide
QESGPEVNI

SEQ ID NO: 18679 - protein, 9 aa, Artificial Sequence
  Description of Artificial Sequence: Synthetic peptide
VEPGLADQL

SEQ ID NO: 18680 - protein, 9 aa, Artificial Sequence
  Description of Artificial Sequence: Synthetic peptide
SEFNLPPIV

SEQ ID NO: 18681 - protein, 10 aa, Artificial Sequence
  Description of Artificial Sequence: Synthetic peptide
AEHLKTAVQM

SEQ ID NO: 18682 - protein, 10 aa, Artificial Sequence
  Description of Artificial Sequence: Synthetic peptide
YVDNGTNVTL

SEQ ID NO: 18683 - protein, 11 aa, Artificial Sequence
  Description of Artificial Sequence: Synthetic peptide
QELKNSAIDLL

SEQ ID NO: 18684 - protein, 10 aa, Artificial Sequence
  Description of Artificial Sequence: Synthetic peptide
AEAMSQMTNM

SEQ ID NO: 18685 - protein, 11 aa, Artificial Sequence
  Description of Artificial Sequence: Synthetic peptide
EEMTSSPKQEL

SEQ ID NO: 18686 - protein, 11 aa, Artificial Sequence
  Description of Artificial Sequence: Synthetic peptide
QELKNSAINLL

SEQ ID NO: 18687 - protein, 9 aa, Artificial Sequence
  Description of Artificial Sequence: Synthetic peptide
GEGSPQISL

SEQ ID NO: 18688 - protein, 10 aa, Artificial Sequence
  Description of Artificial Sequence: Synthetic peptide
KEQEPPLTSL

SEQ ID NO: 18689 - protein, 10 aa, Artificial Sequence
  Description of Artificial Sequence: Synthetic peptide
KEKEPPLTSL

SEQ ID NO: 18690 - protein, 10 aa, Artificial Sequence
  Description of Artificial Sequence: Synthetic peptide
TEDITGNITL

SEQ ID NO: 18691 - protein, 10 aa, Artificial Sequence
  Description of Artificial Sequence: Synthetic peptide
GEVIGNIRQA

SEQ ID NO: 18692 - protein, 10 aa, Artificial Sequence
  Description of Artificial Sequence: Synthetic peptide
GEKGVGSPQI

SEQ ID NO: 18693 - protein, 9 aa, Artificial Sequence
  Description of Artificial Sequence: Synthetic peptide
SEFNLPPIV

SEQ ID NO: 18694 - protein, 10 aa, Artificial Sequence
  Description of Artificial Sequence: Synthetic peptide
TETTNQKTEL

SEQ ID NO: 18695 - protein, 10 aa, Artificial Sequence
  Description of Artificial Sequence: Synthetic peptide
IEVQDTSEAL

SEQ ID NO: 18696 - protein, 8 aa, Artificial Sequence
  Description of Artificial Sequence: Synthetic peptide
TDIQTKEL

SEQ ID NO: 18697 - protein, 10 aa, Artificial Sequence
  Description of Artificial Sequence: Synthetic peptide
AEHLKTAVQM

SEQ ID NO: 18698 - protein, 10 aa, Artificial Sequence
  Description of Artificial Sequence: Synthetic peptide
AEGTDRIIEL

SEQ ID NO: 18699 - protein, 10 aa, Artificial Sequence
  Description of Artificial Sequence: Synthetic peptide
AEHLRTAVQM

SEQ ID NO: 18700 - protein, 10 aa, Artificial Sequence
  Description of Artificial Sequence: Synthetic peptide
IEVKDTKEAL

SEQ ID NO: 18701 - protein, 9 aa, Artificial Sequence
  Description of Artificial Sequence: Synthetic peptide
GERVLATCL

SEQ ID NO: 18702 - protein, 9 aa, Artificial Sequence
  Description of Artificial Sequence: Synthetic peptide
IEGQLKEAL

SEQ ID NO: 18703 - protein, 8 aa, Artificial Sequence
  Description of Artificial Sequence: Synthetic peptide
TDIPTKEL

SEQ ID NO: 18704 - protein, 11 aa, Artificial Sequence
  Description of Artificial Sequence: Synthetic peptide
EEMTSSPKQEL

SEQ ID NO: 18705 - protein, 8 aa, Artificial Sequence
  Description of Artificial Sequence: Synthetic peptide
IETVPVTL

SEQ ID NO: 18706 - protein, 8 aa, Artificial Sequence
  Description of Artificial Sequence: Synthetic peptide
IETVPVKL

SEQ ID NO: 18707 - protein, 11 aa, Artificial Sequence
  Description of Artificial Sequence: Synthetic peptide
EEITPSPRQEL

SEQ ID NO: 18708 - protein, 10 aa, Artificial Sequence
  Description of Artificial Sequence: Synthetic peptide
QELKNSAISL

SEQ ID NO: 18709 - protein, 9 aa, Artificial Sequence
  Description of Artificial Sequence: Synthetic peptide
GEIQEQRNC

SEQ ID NO: 18710 - protein, 9 aa, Artificial Sequence
  Description of Artificial Sequence: Synthetic peptide
SERILTDCL

SEQ ID NO: 18711 - protein, 9 aa, Artificial Sequence
  Description of Artificial Sequence: Synthetic peptide
IEDPEREVL

SEQ ID NO: 18712 - protein, 9 aa, Artificial Sequence
  Description of Artificial Sequence: Synthetic peptide
MEDDGREVL

SEQ ID NO: 18713 - protein, 10 aa, Artificial Sequence
  Description of Artificial Sequence: Synthetic peptide
SEFNLPPIVA

SEQ ID NO: 18714 - protein, 8 aa, Artificial Sequence
  Description of Artificial Sequence: Synthetic peptide
VEAIIRTL

SEQ ID NO: 18715 - protein, 9 aa, Artificial Sequence
  Description of Artificial Sequence: Synthetic peptide
VDNGTNVTL

SEQ ID NO: 18716 - protein, 10 aa, Artificial Sequence
  Description of Artificial Sequence: Synthetic peptide
SESAIRGAIL

SEQ ID NO: 18717 - protein, 9 aa, Artificial Sequence
  Description of Artificial Sequence: Synthetic peptide
AEWDRVHPV

SEQ ID NO: 18718 - protein, 8 aa, Artificial Sequence
  Description of Artificial Sequence: Synthetic peptide
IEQIQPAI

SEQ ID NO: 18719 - protein, 9 aa, Artificial Sequence
  Description of Artificial Sequence: Synthetic peptide
IEGQLREAL

SEQ ID NO: 18720 - protein, 10 aa, Artificial Sequence
  Description of Artificial Sequence: Synthetic peptide
GEKGEGSPQI

SEQ ID NO: 18721 - protein, 8 aa, Artificial Sequence
  Description of Artificial Sequence: Synthetic peptide
KEPPLASL

SEQ ID NO: 18722 - protein, 8 aa, Artificial Sequence
  Description of Artificial Sequence: Synthetic peptide
KEPPLTSL

SEQ ID NO: 18723 - protein, 11 aa, Artificial Sequence
  Description of Artificial Sequence: Synthetic peptide
VEALTRILQQL

SEQ ID NO: 18724 - protein, 9 aa, Artificial Sequence
  Description of Artificial Sequence: Synthetic peptide
TEVVQKIAT

SEQ ID NO: 18725 - protein, 9 aa, Artificial Sequence
  Description of Artificial Sequence: Synthetic peptide
AEWDRTHPV

SEQ ID NO: 18726 - protein, 9 aa, Artificial Sequence
  Description of Artificial Sequence: Synthetic peptide
SEGATPQDL

SEQ ID NO: 18727 - protein, 11 aa, Artificial Sequence
  Description of Artificial Sequence: Synthetic peptide
VEALIRTLQQL

SEQ ID NO: 18728 - protein, 10 aa, Artificial Sequence
  Description of Artificial Sequence: Synthetic peptide
KDKEPPLASL

SEQ ID NO: 18729 - protein, 11 aa, Artificial Sequence
  Description of Artificial Sequence: Synthetic peptide
QEPPLTSLRSL

SEQ ID NO: 18730 - protein, 11 aa, Artificial Sequence
  Description of Artificial Sequence: Synthetic peptide
QELKNSAVNLL

SEQ ID NO: 18731 - protein, 9 aa, Artificial Sequence
  Description of Artificial Sequence: Synthetic peptide
EEFVNTPHL

SEQ ID NO: 18732 - protein, 9 aa, Artificial Sequence
  Description of Artificial Sequence: Synthetic peptide
LETEPIVGA

SEQ ID NO: 18733 - protein, 11 aa, Artificial Sequence
  Description of Artificial Sequence: Synthetic peptide
AEPVAEGVGAV

SEQ ID NO: 18734 - protein, 8 aa, Artificial Sequence
  Description of Artificial Sequence: Synthetic peptide
IEITSHTF

SEQ ID NO: 18735 - protein, 11 aa, Artificial Sequence
  Description of Artificial Sequence: Synthetic peptide
VEAIIRTLQQL

SEQ ID NO: 18736 - protein, 9 aa, Artificial Sequence
  Description of Artificial Sequence: Synthetic peptide
SESELVNQI

SEQ ID NO: 18737 - protein, 10 aa, Artificial Sequence
  Description of Artificial Sequence: Synthetic peptide
GEVIGNIRQA

SEQ ID NO: 18738 - protein, 10 aa, Artificial Sequence
  Description of Artificial Sequence: Synthetic peptide
SEFNLPPIVA

SEQ ID NO: 18739 - protein, 9 aa, Artificial Sequence
  Description of Artificial Sequence: Synthetic peptide
LETEPIVGA

SEQ ID NO: 18740 - protein, 9 aa, Artificial Sequence
  Description of Artificial Sequence: Synthetic peptide
LETEPIAGA

SEQ ID NO: 18741 - protein, 9 aa, Artificial Sequence
  Description of Artificial Sequence: Synthetic peptide
LEAEPIAGA

SEQ ID NO: 18742 - protein, 10 aa, Artificial Sequence
  Description of Artificial Sequence: Synthetic peptide
REFPPEEARA

SEQ ID NO: 18743 - protein, 9 aa, Artificial Sequence
  Description of Artificial Sequence: Synthetic peptide
SEFNLPPIV

SEQ ID NO: 18744 - protein, 9 aa, Artificial Sequence
  Description of Artificial Sequence: Synthetic peptide
GEIQEQRNC

SEQ ID NO: 18745 - protein, 9 aa, Artificial Sequence
  Description of Artificial Sequence: Synthetic peptide
AETYYIDGA

SEQ ID NO: 18746 - protein, 9 aa, Artificial Sequence
  Description of Artificial Sequence: Synthetic peptide
TETLLVQNA

SEQ ID NO: 18747 - protein, 9 aa, Artificial Sequence
  Description of Artificial Sequence: Synthetic peptide
EEVGFPVRP

SEQ ID NO: 18748 - protein, 10 aa, Artificial Sequence
  Description of Artificial Sequence: Synthetic peptide
TEIVPLTKEA

SEQ ID NO: 18749 - protein, 9 aa, Artificial Sequence
  Description of Artificial Sequence: Synthetic peptide
LETEPIEGA

SEQ ID NO: 18750 - protein, 10 aa, Artificial Sequence
  Description of Artificial Sequence: Synthetic peptide
SEVHIPLGEA

SEQ ID NO: 18751 - protein, 9 aa, Artificial Sequence
  Description of Artificial Sequence: Synthetic peptide
IEVKDTKEA

SEQ ID NO: 18752 - protein, 9 aa, Artificial Sequence
  Description of Artificial Sequence: Synthetic peptide
QEFGIPYNP

SEQ ID NO: 18753 - protein, 8 aa, Artificial Sequence
  Description of Artificial Sequence: Synthetic peptide
REFPPEEA

SEQ ID NO: 18754 - protein, 9 aa, Artificial Sequence
  Description of Artificial Sequence: Synthetic peptide
AETYYVDGA

SEQ ID NO: 18755 - protein, 9 aa, Artificial Sequence
  Description of Artificial Sequence: Synthetic peptide
AEWDRVHPV

SEQ ID NO: 18756 - protein, 11 aa, Artificial Sequence
  Description of Artificial Sequence: Synthetic peptide
GESPAVLGTGA

SEQ ID NO: 18757 - protein, 9 aa, Artificial Sequence
  Description of Artificial Sequence: Synthetic peptide
GENNSLLHP

SEQ ID NO: 18758 - protein, 10 aa, Artificial Sequence
  Description of Artificial Sequence: Synthetic peptide
AETYYIDGAA

SEQ ID NO: 18759 - protein, 8 aa, Artificial Sequence
  Description of Artificial Sequence: Synthetic peptide
SESAIRKA

SEQ ID NO: 18760 - protein, 10 aa, Artificial Sequence
  Description of Artificial Sequence: Synthetic peptide
KEKEPPLTSL

SEQ ID NO: 18761 - protein, 10 aa, Artificial Sequence
  Description of Artificial Sequence: Synthetic peptide
KEQEPPLTSL

SEQ ID NO: 18762 - protein, 9 aa, Artificial Sequence
  Description of Artificial Sequence: Synthetic peptide
GEGSPQISL

SEQ ID NO: 18763 - protein, 9 aa, Artificial Sequence
  Description of Artificial Sequence: Synthetic peptide
GERVLATCL

SEQ ID NO: 18764 - protein, 9 aa, Artificial Sequence
  Description of Artificial Sequence: Synthetic peptide
IEDPEREVL

SEQ ID NO: 18765 - protein, 8 aa, Artificial Sequence
  Description of Artificial Sequence: Synthetic peptide
TDIQTKEL

SEQ ID NO: 18766 - protein, 9 aa, Artificial Sequence
  Description of Artificial Sequence: Synthetic peptide
MEDDGREVL

SEQ ID NO: 18767 - protein, 8 aa, Artificial Sequence
  Description of Artificial Sequence: Synthetic peptide
AEHLRTAV

SEQ ID NO: 18768 - protein, 8 aa, Artificial Sequence
  Description of Artificial Sequence: Synthetic peptide
AEHLKTAV

SEQ ID NO: 18769 - protein, 9 aa, Artificial Sequence
  Description of Artificial Sequence: Synthetic peptide
SERILTDCL

SEQ ID NO: 18770 - protein, 10 aa, Artificial Sequence
  Description of Artificial Sequence: Synthetic peptide
GEKGVGSPQI

SEQ ID NO: 18771 - protein, 9 aa, Artificial Sequence
  Description of Artificial Sequence: Synthetic peptide
SERILTSCL

SEQ ID NO: 18772 - protein, 9 aa, Artificial Sequence
  Description of Artificial Sequence: Synthetic peptide
GEQDRGRSV

SEQ ID NO: 18773 - protein, 9 aa, Artificial Sequence
  Description of Artificial Sequence: Synthetic peptide
SESAIRKAI

SEQ ID NO: 18774 - protein, 8 aa, Artificial Sequence
  Description of Artificial Sequence: Synthetic peptide
TDIPTKEL

SEQ ID NO: 18775 - protein, 9 aa, Artificial Sequence
  Description of Artificial Sequence: Synthetic peptide
IEGQLREAL

SEQ ID NO: 18776 - protein, 10 aa, Artificial Sequence
  Description of Artificial Sequence: Synthetic peptide
AEHLRTAVQM

SEQ ID NO: 18777 - protein, 9 aa, Artificial Sequence
  Description of Artificial Sequence: Synthetic peptide
IEGQLKEAL

SEQ ID NO: 18778 - protein, 8 aa, Artificial Sequence
  Description of Artificial Sequence: Synthetic peptide
IEQIQPAI

SEQ ID NO: 18779 - protein, 8 aa, Artificial Sequence
  Description of Artificial Sequence: Synthetic peptide
AERTGTSF

SEQ ID NO: 18780 - protein, 10 aa, Artificial Sequence
  Description of Artificial Sequence: Synthetic peptide
TEDITGNITL

SEQ ID NO: 18781 - protein, 10 aa, Artificial Sequence
  Description of Artificial Sequence: Synthetic peptide
TETTNQKTEL

SEQ ID NO: 18782 - protein, 8 aa, Artificial Sequence
  Description of Artificial Sequence: Synthetic peptide
AEGQGTSL

SEQ ID NO: 18783 - protein, 8 aa, Artificial Sequence
  Description of Artificial Sequence: Synthetic peptide
VEAIIRTL

SEQ ID NO: 18784 - protein, 10 aa, Artificial Sequence
  Description of Artificial Sequence: Synthetic peptide
AEGTDRIIEL

SEQ ID NO: 18785 - protein, 9 aa, Artificial Sequence
  Description of Artificial Sequence: Synthetic peptide
QEKNEQDLL

SEQ ID NO: 18786 - protein, 8 aa, Artificial Sequence
  Description of Artificial Sequence: Synthetic peptide
IEQLRPSI

SEQ ID NO: 18787 - protein, 9 aa, Artificial Sequence
  Description of Artificial Sequence: Synthetic peptide
KEKGGLEGL

SEQ ID NO: 18788 - protein, 11 aa, Artificial Sequence
  Description of Artificial Sequence: Synthetic peptide
EEMTSSPKQEL

SEQ ID NO: 18789 - protein, 9 aa, Artificial Sequence
  Description of Artificial Sequence: Synthetic peptide
GEQDRDRSI

SEQ ID NO: 18790 - protein, 9 aa, Artificial Sequence
  Description of Artificial Sequence: Synthetic peptide
GEQDRDRSV

SEQ ID NO: 18791 - protein, 11 aa, Artificial Sequence
  Description of Artificial Sequence: Synthetic peptide
EEITPSPRQEL

SEQ ID NO: 18792 - protein, 8 aa, Artificial Sequence
  Description of Artificial Sequence: Synthetic peptide
IEITSHTF

SEQ ID NO: 18793 - protein, 9 aa, Artificial Sequence
  Description of Artificial Sequence: Synthetic peptide
SESAIRGAI

SEQ ID NO: 18794 - protein, 10 aa, Artificial Sequence
  Description of Artificial Sequence: Synthetic peptide
AEHLKTAVQM

SEQ ID NO: 18795 - protein, 10 aa, Artificial Sequence
  Description of Artificial Sequence: Synthetic peptide
GEKGEGSPQI

SEQ ID NO: 18796 - protein, 9 aa, Artificial Sequence
  Description of Artificial Sequence: Synthetic peptide
SERILHTCL

SEQ ID NO: 18797 - protein, 8 aa, Artificial Sequence
  Description of Artificial Sequence: Synthetic peptide
TERQANFL

SEQ ID NO: 18798 - protein, 9 aa, Artificial Sequence
  Description of Artificial Sequence: Synthetic peptide
VDNGTNVTL

SEQ ID NO: 18799 - protein, 9 aa, Artificial Sequence
  Description of Artificial Sequence: Synthetic peptide
MEDEEKEVL

SEQ ID NO: 18800 - protein, 10 aa, Artificial Sequence
  Description of Artificial Sequence: Synthetic peptide
SESAIRGAIL

SEQ ID NO: 18801 - protein, 10 aa, Artificial Sequence
  Description of Artificial Sequence: Synthetic peptide
KDKEPPLASL

SEQ ID NO: 18802 - protein, 9 aa, Artificial Sequence
  Description of Artificial Sequence: Synthetic peptide
SEFNLPPIV

SEQ ID NO: 18803 - protein, 8 aa, Artificial Sequence
  Description of Artificial Sequence: Synthetic peptide
KEPPLTSL

SEQ ID NO: 18804 - protein, 8 aa, Artificial Sequence
  Description of Artificial Sequence: Synthetic peptide
VEALIRTL

SEQ ID NO: 18805 - protein, 9 aa, Artificial Sequence
  Description of Artificial Sequence: Synthetic peptide
KEKGGLDGL

SEQ ID NO: 18806 - protein, 9 aa, Artificial Sequence
  Description of Artificial Sequence: Synthetic peptide
GEIQEQRNC

SEQ ID NO: 18807 - protein, 9 aa, Artificial Sequence
  Description of Artificial Sequence: Synthetic peptide
TEMEKEGKI

SEQ ID NO: 18808 - protein, 8 aa, Artificial Sequence
  Description of Artificial Sequence: Synthetic peptide
IEIITHSF

SEQ ID NO: 18809 - protein, 10 aa, Artificial Sequence
  Description of Artificial Sequence: Synthetic peptide
QELKNSAISL

SEQ ID NO: 18810 - protein, 8 aa, Artificial Sequence
  Description of Artificial Sequence: Synthetic peptide
IETVPVTL

SEQ ID NO: 18811 - protein, 9 aa, Artificial Sequence
  Description of Artificial Sequence: Synthetic peptide
AEWDRVHPV

SEQ ID NO: 18812 - protein, 11 aa, Artificial Sequence
  Description of Artificial Sequence: Synthetic peptide
AEQATQDVKNW

SEQ ID NO: 18813 - protein, 11 aa, Artificial Sequence
  Description of Artificial Sequence: Synthetic peptide
AEQATQEVKNW

SEQ ID NO: 18814 - protein, 9 aa, Artificial Sequence
  Description of Artificial Sequence: Synthetic peptide
EEINLPGKW

SEQ ID NO: 18815 - protein, 11 aa, Artificial Sequence
  Description of Artificial Sequence: Synthetic peptide
AEIQKQGQEQW

SEQ ID NO: 18816 - protein, 10 aa, Artificial Sequence
  Description of Artificial Sequence: Synthetic peptide
AEGQGTSLSF

SEQ ID NO: 18817 - protein, 9 aa, Artificial Sequence
  Description of Artificial Sequence: Synthetic peptide
SESAIRKAI

SEQ ID NO: 18818 - protein, 9 aa, Artificial Sequence
  Description of Artificial Sequence: Synthetic peptide
AEIWDNMTW

SEQ ID NO: 18819 - protein, 9 aa, Artificial Sequence
  Description of Artificial Sequence: Synthetic peptide
EEINLLGRW

SEQ ID NO: 18820 - protein, 11 aa, Artificial Sequence
  Description of Artificial Sequence: Synthetic peptide
EEMTPPPKQEM

SEQ ID NO: 18821 - protein, 11 aa, Artificial Sequence
  Description of Artificial Sequence: Synthetic peptide
NEQDLLALDKW

SEQ ID NO: 18822 - protein, 9 aa, Artificial Sequence
  Description of Artificial Sequence: Synthetic peptide
SEIWDNMTW

SEQ ID NO: 18823 - protein, 11 aa, Artificial Sequence
  Description of Artificial Sequence: Synthetic peptide
EEMTSSPKQEL

SEQ ID NO: 18824 - protein, 10 aa, Artificial Sequence
  Description of Artificial Sequence: Synthetic peptide
GEARLVITTY

SEQ ID NO: 18825 - protein, 10 aa, Artificial Sequence
  Description of Artificial Sequence: Synthetic peptide
KEQEPPLTSL

SEQ ID NO: 18826 - protein, 10 aa, Artificial Sequence
  Description of Artificial Sequence: Synthetic peptide
AEPIAGAETY

SEQ ID NO: 18827 - protein, 11 aa, Artificial Sequence
  Description of Artificial Sequence: Synthetic peptide
EEITPSPRQEL

SEQ ID NO: 18828 - protein, 10 aa, Artificial Sequence
  Description of Artificial Sequence: Synthetic peptide
NETPGIRYQY

SEQ ID NO: 18829 - protein, 11 aa, Artificial Sequence
  Description of Artificial Sequence: Synthetic peptide
MEDDGREVLMW

SEQ ID NO: 18830 - protein, 10 aa, Artificial Sequence
  Description of Artificial Sequence: Synthetic peptide
MEMGHLNLGY

SEQ ID NO: 18831 - protein, 9 aa, Artificial Sequence
  Description of Artificial Sequence: Synthetic peptide
YETEKHNVW

SEQ ID NO: 18832 - protein, 9 aa, Artificial Sequence
  Description of Artificial Sequence: Synthetic peptide
AETGQETAY

SEQ ID NO: 18833 - protein, 10 aa, Artificial Sequence
  Description of Artificial Sequence: Synthetic peptide
VEMGHLNLGY

SEQ ID NO: 18834 - protein, 9 aa, Artificial Sequence
  Description of Artificial Sequence: Synthetic peptide
AETGKETAY

SEQ ID NO: 18835 - protein, 11 aa, Artificial Sequence
  Description of Artificial Sequence: Synthetic peptide
AEQATQDVKNW

SEQ ID NO: 18836 - protein, 9 aa, Artificial Sequence
  Description of Artificial Sequence: Synthetic peptide
EEINLPGKW

SEQ ID NO: 18837 - protein, 11 aa, Artificial Sequence
  Description of Artificial Sequence: Synthetic peptide
AEQATQEVKNW

SEQ ID NO: 18838 - protein, 11 aa, Artificial Sequence
  Description of Artificial Sequence: Synthetic peptide
AEIQKQGQEQW

SEQ ID NO: 18839 - protein, 10 aa, Artificial Sequence
  Description of Artificial Sequence: Synthetic peptide
AEGQGTSLSF

SEQ ID NO: 18840 - protein, 9 aa, Artificial Sequence
  Description of Artificial Sequence: Synthetic peptide
SESAIRKAI

SEQ ID NO: 18841 - protein, 10 aa, Artificial Sequence
  Description of Artificial Sequence: Synthetic peptide
GEARLVITTY

SEQ ID NO: 18842 - protein, 9 aa, Artificial Sequence
  Description of Artificial Sequence: Synthetic peptide
EEINLLGRW

SEQ ID NO: 18843 - protein, 11 aa, Artificial Sequence
  Description of Artificial Sequence: Synthetic peptide
AEIQKQGPDQW

SEQ ID NO: 18844 - protein, 10 aa, Artificial Sequence
  Description of Artificial Sequence: Synthetic peptide
NETPGIRYQY

SEQ ID NO: 18845 - protein, 11 aa, Artificial Sequence
  Description of Artificial Sequence: Synthetic peptide
EEMTPPPKQEM

SEQ ID NO: 18846 - protein, 11 aa, Artificial Sequence
  Description of Artificial Sequence: Synthetic peptide
LEVNIVTDSQY

SEQ ID NO: 18847 - protein, 9 aa, Artificial Sequence
  Description of Artificial Sequence: Synthetic peptide
SEIWDNMTW

SEQ ID NO: 18848 - protein, 9 aa, Artificial Sequence
  Description of Artificial Sequence: Synthetic peptide
AEIWDNMTW

SEQ ID NO: 18849 - protein, 10 aa, Artificial Sequence
  Description of Artificial Sequence: Synthetic peptide
MEWDKQINNY

SEQ ID NO: 18850 - protein, 10 aa, Artificial Sequence
  Description of Artificial Sequence: Synthetic peptide
AEPIAGAETY

SEQ ID NO: 18851 - protein, 10 aa, Artificial Sequence
  Description of Artificial Sequence: Synthetic peptide
GEARLVIITY

SEQ ID NO: 18852 - protein, 11 aa, Artificial Sequence
  Description of Artificial Sequence: Synthetic peptide
NEQDLLALDKW

SEQ ID NO: 18853 - protein, 9 aa, Artificial Sequence
  Description of Artificial Sequence: Synthetic peptide
SESELVNQI

SEQ ID NO: 18854 - protein, 11 aa, Artificial Sequence
  Description of Artificial Sequence: Synthetic peptide
EEMTSSPKQEL

SEQ ID NO: 18855 - protein, 9 aa, Artificial Sequence
  Description of Artificial Sequence: Synthetic peptide
YETEKHNVW

SEQ ID NO: 18856 - protein, 10 aa, Artificial Sequence
  Description of Artificial Sequence: Synthetic peptide
MEWDKQISNY

SEQ ID NO: 18857 - protein, 10 aa, Artificial Sequence
  Description of Artificial Sequence: Synthetic peptide
KEQEPPLTSL

SEQ ID NO: 18858 - protein, 11 aa, Artificial Sequence
  Description of Artificial Sequence: Synthetic peptide
MEDDGREVLMW

SEQ ID NO: 18859 - protein, 10 aa, Artificial Sequence
  Description of Artificial Sequence: Synthetic peptide
MEMGHLNLGY

SEQ ID NO: 18860 - protein, 10 aa, Artificial Sequence
  Description of Artificial Sequence: Synthetic peptide
AEGQGTSLCF

SEQ ID NO: 18861 - protein, 9 aa, Artificial Sequence
  Description of Artificial Sequence: Synthetic peptide
REAKIIRDY

SEQ ID NO: 18862 - protein, 10 aa, Artificial Sequence
  Description of Artificial Sequence: Synthetic peptide
TEPIVGAETY

SEQ ID NO: 18863 - protein, 10 aa, Artificial Sequence
  Description of Artificial Sequence: Synthetic peptide
RETKIGKAGY

SEQ ID NO: 18864 - protein, 8 aa, Artificial Sequence
  Description of Artificial Sequence: Synthetic peptide
TETDPFDW

SEQ ID NO: 18865 - protein, 10 aa, Artificial Sequence
  Description of Artificial Sequence: Synthetic peptide
VEMGHLNLGY

SEQ ID NO: 18866 - protein, 9 aa, Artificial Sequence
  Description of Artificial Sequence: Synthetic peptide
AETGQETAY

SEQ ID NO: 18867 - protein, 11 aa, Artificial Sequence
  Description of Artificial Sequence: Synthetic peptide
EEITPSPRQEL

SEQ ID NO: 18868 - protein, 9 aa, Artificial Sequence
  Description of Artificial Sequence: Synthetic peptide
TEMEKEGKI

SEQ ID NO: 18869 - protein, 9 aa, Artificial Sequence
  Description of Artificial Sequence: Synthetic peptide
GENLWVTVY

SEQ ID NO: 18870 - protein, 9 aa, Artificial Sequence
  Description of Artificial Sequence: Synthetic peptide
AETGKETAY

SEQ ID NO: 18871 - protein, 11 aa, Artificial Sequence
  Description of Artificial Sequence: Synthetic peptide
GEARLVITTYW

SEQ ID NO: 18872 - protein, 10 aa, Artificial Sequence
  Description of Artificial Sequence: Synthetic peptide
TEPIAGAETY

SEQ ID NO: 18873 - protein, 10 aa, Artificial Sequence
  Description of Artificial Sequence: Synthetic peptide
AETGQETAYF

SEQ ID NO: 18874 - protein, 9 aa, Artificial Sequence
  Description of Artificial Sequence: Synthetic peptide
DEIWDNMTW

SEQ ID NO: 18875 - protein, 11 aa, Artificial Sequence
  Description of Artificial Sequence: Synthetic peptide
EEIKNEAVRHF

SEQ ID NO: 18876 - protein, 11 aa, Artificial Sequence
  Description of Artificial Sequence: Synthetic peptide
EELKSEAVRHY

SEQ ID NO: 18877 - protein, 11 aa, Artificial Sequence
  Description of Artificial Sequence: Synthetic peptide
AEPIAGAETYY

SEQ ID NO: 18878 - protein, 8 aa, Artificial Sequence
  Description of Artificial Sequence: Synthetic peptide
NETPGIRY

SEQ ID NO: 18879 - protein, 9 aa, Artificial Sequence
  Description of Artificial Sequence: Synthetic peptide
EEIKSLFNL

SEQ ID NO: 18880 - protein, 11 aa, Artificial Sequence
  Description of Artificial Sequence: Synthetic peptide
GEARLVIITYW

SEQ ID NO: 18881 - protein, 10 aa, Artificial Sequence
  Description of Artificial Sequence: Synthetic peptide
RETKIGRAGY

SEQ ID NO: 18882 - protein, 9 aa, Artificial Sequence
  Description of Artificial Sequence: Synthetic peptide
QESGPEVNI

SEQ ID NO: 18883 - protein, 9 aa, Artificial Sequence
  Description of Artificial Sequence: Synthetic peptide
YEPEKHNVW

SEQ ID NO: 18884 - protein, 10 aa, Artificial Sequence
  Description of Artificial Sequence: Synthetic peptide
KEQEPPLTSL

SEQ ID NO: 18885 - protein, 11 aa, Artificial Sequence
  Description of Artificial Sequence: Synthetic peptide
AEIQKQGQEQW

SEQ ID NO: 18886 - protein, 10 aa, Artificial Sequence
  Description of Artificial Sequence: Synthetic peptide
AEGQGTSLSF

SEQ ID NO: 18887 - protein, 11 aa, Artificial Sequence
  Description of Artificial Sequence: Synthetic peptide
EEMTSSPKQEL

SEQ ID NO: 18888 - protein, 11 aa, Artificial Sequence
  Description of Artificial Sequence: Synthetic peptide
EEITPSPRQEL

SEQ ID NO: 18889 - protein, 10 aa, Artificial Sequence
  Description of Artificial Sequence: Synthetic peptide
TEDITGNITL

SEQ ID NO: 18890 - protein, 11 aa, Artificial Sequence
  Description of Artificial Sequence: Synthetic peptide
AEQATQEVKNW

SEQ ID NO: 18891 - protein, 11 aa, Artificial Sequence
  Description of Artificial Sequence: Synthetic peptide
EEMTPPPKQEM

SEQ ID NO: 18892 - protein, 11 aa, Artificial Sequence
  Description of Artificial Sequence: Synthetic peptide
AEQATQDVKNW

SEQ ID NO: 18893 - protein, 10 aa, Artificial Sequence
  Description of Artificial Sequence: Synthetic peptide
AETGQETAYF

SEQ ID NO: 18894 - protein, 9 aa, Artificial Sequence
  Description of Artificial Sequence: Synthetic peptide
EEINLPGKW

SEQ ID NO: 18895 - protein, 10 aa, Artificial Sequence
  Description of Artificial Sequence: Synthetic peptide
TETTNQKTEL

SEQ ID NO: 18896 - protein, 11 aa, Artificial Sequence
  Description of Artificial Sequence: Synthetic peptide
AEIQKQGPDQW

SEQ ID NO: 18897 - protein, 10 aa, Artificial Sequence
  Description of Artificial Sequence: Synthetic peptide
AEGQGTSLCF

SEQ ID NO: 18898 - protein, 10 aa, Artificial Sequence
  Description of Artificial Sequence: Synthetic peptide
AEAMSQMTNM

SEQ ID NO: 18899 - protein, 10 aa, Artificial Sequence
  Description of Artificial Sequence: Synthetic peptide
KEKEPPLTSL

SEQ ID NO: 18900 - protein, 9 aa, Artificial Sequence
  Description of Artificial Sequence: Synthetic peptide
GEGSPQISL

SEQ ID NO: 18901 - protein, 9 aa, Artificial Sequence
  Description of Artificial Sequence: Synthetic peptide
QEDGEEVGF

SEQ ID NO: 18902 - protein, 10 aa, Artificial Sequence
  Description of Artificial Sequence: Synthetic peptide
AEGTDRIIEL

SEQ ID NO: 18903 - protein, 10 aa, Artificial Sequence
  Description of Artificial Sequence: Synthetic peptide
GEQKLTNCSF

SEQ ID NO: 18904 - protein, 11 aa, Artificial Sequence
  Description of Artificial Sequence: Synthetic peptide
QELKNSAVNLL

SEQ ID NO: 18905 - protein, 10 aa, Artificial Sequence
  Description of Artificial Sequence: Synthetic peptide
GEKGVGSPQI

SEQ ID NO: 18906 - protein, 9 aa, Artificial Sequence
  Description of Artificial Sequence: Synthetic peptide
QESGPEVNI

SEQ ID NO: 18907 - protein, 11 aa, Artificial Sequence
  Description of Artificial Sequence: Synthetic peptide
AELELAENREI

SEQ ID NO: 18908 - protein, 10 aa, Artificial Sequence
  Description of Artificial Sequence: Synthetic peptide
SESAIRGAIL

SEQ ID NO: 18909 - protein, 11 aa, Artificial Sequence
  Description of Artificial Sequence: Synthetic peptide
QELKNSAINLL

SEQ ID NO: 18910 - protein, 10 aa, Artificial Sequence
  Description of Artificial Sequence: Synthetic peptide
GDIEITSHTF

SEQ ID NO: 18911 - protein, 10 aa, Artificial Sequence
  Description of Artificial Sequence: Synthetic peptide
AEHLKTAVQM

SEQ ID NO: 18912 - protein, 9 aa, Artificial Sequence
  Description of Artificial Sequence: Synthetic peptide
TEMEKEGKI

SEQ ID NO: 18913 - protein, 10 aa, Artificial Sequence
  Description of Artificial Sequence: Synthetic peptide
AETGKETAYF

SEQ ID NO: 18914 - protein, 9 aa, Artificial Sequence
  Description of Artificial Sequence: Synthetic peptide
SESELVNQI

SEQ ID NO: 18915 - protein, 9 aa, Artificial Sequence
  Description of Artificial Sequence: Synthetic peptide
QEEAEEVGF

SEQ ID NO: 18916 - protein, 10 aa, Artificial Sequence
  Description of Artificial Sequence: Synthetic peptide
QELKNSAISL

SEQ ID NO: 18917 - protein, 10 aa, Artificial Sequence
  Description of Artificial Sequence: Synthetic peptide
AEHLRTAVQM

SEQ ID NO: 18918 - protein, 9 aa, Artificial Sequence
  Description of Artificial Sequence: Synthetic peptide
EDITGNITL

SEQ ID NO: 18919 - protein, 10 aa, Artificial Sequence
  Description of Artificial Sequence: Synthetic peptide
QELKNSAVNL

SEQ ID NO: 18920 - protein, 10 aa, Artificial Sequence
  Description of Artificial Sequence: Synthetic peptide
AEGTDRIIEI

SEQ ID NO: 18921 - protein, 9 aa, Artificial Sequence
  Description of Artificial Sequence: Synthetic peptide
SESAIRKAI

SEQ ID NO: 18922 - protein, 9 aa, Artificial Sequence
  Description of Artificial Sequence: Synthetic peptide
EEFVNTPHL

SEQ ID NO: 18923 - protein, 10 aa, Artificial Sequence
  Description of Artificial Sequence: Synthetic peptide
QELKNSAINL

SEQ ID NO: 18924 - protein, 11 aa, Artificial Sequence
  Description of Artificial Sequence: Synthetic peptide
AELELEENREI

SEQ ID NO: 18925 - protein, 9 aa, Artificial Sequence
  Description of Artificial Sequence: Synthetic peptide
QEEEEEVGF

SEQ ID NO: 18926 - protein, 9 aa, Artificial Sequence
  Description of Artificial Sequence: Synthetic peptide
SEGATPQDL

SEQ ID NO: 18927 - protein, 10 aa, Artificial Sequence
  Description of Artificial Sequence: Synthetic peptide
GDMEVRTHSF

SEQ ID NO: 18928 - protein, 10 aa, Artificial Sequence
  Description of Artificial Sequence: Synthetic peptide
GEKGEGSPQI

SEQ ID NO: 18929 - protein, 10 aa, Artificial Sequence
  Description of Artificial Sequence: Synthetic peptide
AEGTDGIIVI

SEQ ID NO: 18930 - protein, 11 aa, Artificial Sequence
  Description of Artificial Sequence: Synthetic peptide
GEIQEQRNCSF

SEQ ID NO: 18931 - protein, 10 aa, Artificial Sequence
  Description of Artificial Sequence: Synthetic peptide
MEDDGREVLM

SEQ ID NO: 18932 - protein, 9 aa, Artificial Sequence
  Description of Artificial Sequence: Synthetic peptide
QEQNEQDLL

SEQ ID NO: 18933 - protein, 9 aa, Artificial Sequence
  Description of Artificial Sequence: Synthetic peptide
SESAIRGAI

SEQ ID NO: 18934 - protein, 9 aa, Artificial Sequence
  Description of Artificial Sequence: Synthetic peptide
MEDDGREVL

SEQ ID NO: 18935 - protein, 8 aa, Artificial Sequence
  Description of Artificial Sequence: Synthetic peptide
IEITSHTF

SEQ ID NO: 18936 - protein, 9 aa, Artificial Sequence
  Description of Artificial Sequence: Synthetic peptide
QEKNEQDLL

SEQ ID NO: 18937 - protein, 11 aa, Artificial Sequence
  Description of Artificial Sequence: Synthetic peptide
EEIKNEAVRHF

SEQ ID NO: 18938 - protein, 11 aa, Artificial Sequence
  Description of Artificial Sequence: Synthetic peptide
QEQNEQDLLAL

SEQ ID NO: 18939 - protein, 9 aa, Artificial Sequence
  Description of Artificial Sequence: Synthetic peptide
EEIKSLFNL

SEQ ID NO: 18940 - protein, 11 aa, Artificial Sequence
  Description of Artificial Sequence: Synthetic peptide
AEGVGAVSQDL

SEQ ID NO: 18941 - protein, 9 aa, Artificial Sequence
  Description of Artificial Sequence: Synthetic peptide
MEMEKEGKI

SEQ ID NO: 18942 - protein, 10 aa, Artificial Sequence
  Description of Artificial Sequence: Synthetic peptide
AEPIAGAETY

SEQ ID NO: 18943 - protein, 10 aa, Artificial Sequence
  Description of Artificial Sequence: Synthetic peptide
REQNPEMVIY

SEQ ID NO: 18944 - protein, 9 aa, Artificial Sequence
  Description of Artificial Sequence: Synthetic peptide
GEQDRDRSI

SEQ ID NO: 18945 - protein, 9 aa, Artificial Sequence
  Description of Artificial Sequence: Synthetic peptide
AEEQIIIRT

SEQ ID NO: 18946 - protein, 10 aa, Artificial Sequence
  Description of Artificial Sequence: Synthetic peptide
AERTGTSFNF

SEQ ID NO: 18947 - protein, 11 aa, Artificial Sequence
  Description of Artificial Sequence: Synthetic peptide
QELKNSAISLL

SEQ ID NO: 18948 - protein, 9 aa, Artificial Sequence
  Description of Artificial Sequence: Synthetic peptide
QLTEVVQKI

SEQ ID NO: 18949 - protein, 9 aa, Artificial Sequence
  Description of Artificial Sequence: Synthetic peptide
IEDPEREVL

SEQ ID NO: 18950 - protein, 11 aa, Artificial Sequence
  Description of Artificial Sequence: Synthetic peptide
LEVNIVTDSQY

SEQ ID NO: 18951 - protein, 11 aa, Artificial Sequence
  Description of Artificial Sequence: Synthetic peptide
QELKNSAIDLL

SEQ ID NO: 18952 - protein, 10 aa, Artificial Sequence
  Description of Artificial Sequence: Synthetic peptide
GDLEVTTHSF

SEQ ID NO: 18953 - protein, 9 aa, Artificial Sequence
  Description of Artificial Sequence: Synthetic peptide
NEGENNSLL

SEQ ID NO: 18954 - protein, 10 aa, Artificial Sequence
  Description of Artificial Sequence: Synthetic peptide
ILKEPVHGAY

SEQ ID NO: 18955 - protein, 9 aa, Artificial Sequence
  Description of Artificial Sequence: Synthetic peptide
RAVGMGASF

SEQ ID NO: 18956 - protein, 10 aa, Artificial Sequence
  Description of Artificial Sequence: Synthetic peptide
SIRIGPGQAF

SEQ ID NO: 18957 - protein, 9 aa, Artificial Sequence
  Description of Artificial Sequence: Synthetic peptide
HLNNRTISF

SEQ ID NO: 18958 - protein, 8 aa, Artificial Sequence
  Description of Artificial Sequence: Synthetic peptide
GKQKIVSL

SEQ ID NO: 18959 - protein, 9 aa, Artificial Sequence
  Description of Artificial Sequence: Synthetic peptide
KQVGTLQYL

SEQ ID NO: 18960 - protein, 11 aa, Artificial Sequence
  Description of Artificial Sequence: Synthetic peptide
RYVDNGTNVTL

SEQ ID NO: 18961 - protein, 9 aa, Artificial Sequence
  Description of Artificial Sequence: Synthetic peptide
GKKAIGTVL

SEQ ID NO: 18962 - protein, 8 aa, Artificial Sequence
  Description of Artificial Sequence: Synthetic peptide
HQAAMQML

SEQ ID NO: 18963 - protein, 9 aa, Artificial Sequence
  Description of Artificial Sequence: Synthetic peptide
HQAISPRTL

SEQ ID NO: 18964 - protein, 8 aa, Artificial Sequence
  Description of Artificial Sequence: Synthetic peptide
GKQKVVSL

SEQ ID NO: 18965 - protein, 8 aa, Artificial Sequence
  Description of Artificial Sequence: Synthetic peptide
IQAQQHML

SEQ ID NO: 18966 - protein, 8 aa, Artificial Sequence
  Description of Artificial Sequence: Synthetic peptide
GKQKVVAL

SEQ ID NO: 18967 - protein, 9 aa, Artificial Sequence
  Description of Artificial Sequence: Synthetic peptide
IKPVVSTQL

SEQ ID NO: 18968 - protein, 8 aa, Artificial Sequence
  Description of Artificial Sequence: Synthetic peptide
GQVILVAV

SEQ ID NO: 18969 - protein, 9 aa, Artificial Sequence
  Description of Artificial Sequence: Synthetic peptide
VDNGTNVTL

SEQ ID NO: 18970 - protein, 10 aa, Artificial Sequence
  Description of Artificial Sequence: Synthetic peptide
KEQEPPLTSL

SEQ ID NO: 18971 - protein, 11 aa, Artificial Sequence
  Description of Artificial Sequence: Synthetic peptide
TQIDPDLADQL

SEQ ID NO: 18972 - protein, 10 aa, Artificial Sequence
  Description of Artificial Sequence: Synthetic peptide
SLFGNDPLSQ

SEQ ID NO: 18973 - protein, 8 aa, Artificial Sequence
  Description of Artificial Sequence: Synthetic peptide
KQLQARVL

SEQ ID NO: 18974 - protein, 8 aa, Artificial Sequence
  Description of Artificial Sequence: Synthetic peptide
KKAIGTVL

SEQ ID NO: 18975 - protein, 9 aa, Artificial Sequence
  Description of Artificial Sequence: Synthetic peptide
SESELVNQI

SEQ ID NO: 18976 - protein, 10 aa, Artificial Sequence
  Description of Artificial Sequence: Synthetic peptide
CEYQAGHNQV

SEQ ID NO: 18977 - protein, 8 aa, Artificial Sequence
  Description of Artificial Sequence: Synthetic peptide
YEQVAIEI

SEQ ID NO: 18978 - protein, 9 aa, Artificial Sequence
  Description of Artificial Sequence: Synthetic peptide
SEFNLPPIV

SEQ ID NO: 18979 - protein, 8 aa, Artificial Sequence
  Description of Artificial Sequence: Synthetic peptide
IEQIQPAI

SEQ ID NO: 18980 - protein, 9 aa, Artificial Sequence
  Description of Artificial Sequence: Synthetic peptide
QESGPEVNI

SEQ ID NO: 18981 - protein, 10 aa, Artificial Sequence
  Description of Artificial Sequence: Synthetic peptide
CEYQTGHNKV

SEQ ID NO: 18982 - protein, 9 aa, Artificial Sequence
  Description of Artificial Sequence: Synthetic peptide
TEMEKEGKI

SEQ ID NO: 18983 - protein, 8 aa, Artificial Sequence
  Description of Artificial Sequence: Synthetic peptide
FESTHPKI

SEQ ID NO: 18984 - protein, 10 aa, Artificial Sequence
  Description of Artificial Sequence: Synthetic peptide
TEDITGNITL

SEQ ID NO: 18985 - protein, 10 aa, Artificial Sequence
  Description of Artificial Sequence: Synthetic peptide
GEKGVGSPQI

SEQ ID NO: 18986 - protein, 9 aa, Artificial Sequence
  Description of Artificial Sequence: Synthetic peptide
AEWDRTHPV

SEQ ID NO: 18987 - protein, 9 aa, Artificial Sequence
  Description of Artificial Sequence: Synthetic peptide
AEWDRVHPV

SEQ ID NO: 18988 - protein, 9 aa, Artificial Sequence
  Description of Artificial Sequence: Synthetic peptide
EEIYRLLEV

SEQ ID NO: 18989 - protein, 9 aa, Artificial Sequence
  Description of Artificial Sequence: Synthetic peptide
MEMEKEGKI

SEQ ID NO: 18990 - protein, 9 aa, Artificial Sequence
  Description of Artificial Sequence: Synthetic peptide
YESTNPKTS

SEQ ID NO: 18991 - protein, 9 aa, Artificial Sequence
  Description of Artificial Sequence: Synthetic peptide
VEQMHTDII

SEQ ID NO: 18992 - protein, 10 aa, Artificial Sequence
  Description of Artificial Sequence: Synthetic peptide
GEKGEGSPQI

SEQ ID NO: 18993 - protein, 9 aa, Artificial Sequence
  Description of Artificial Sequence: Synthetic peptide
TELLQVCKI

SEQ ID NO: 18994 - protein, 8 aa, Artificial Sequence
  Description of Artificial Sequence: Synthetic peptide
GENLWVTV

SEQ ID NO: 18995 - protein, 8 aa, Artificial Sequence
  Description of Artificial Sequence: Synthetic peptide
GEAIHGQV

SEQ ID NO: 18996 - protein, 9 aa, Artificial Sequence
  Description of Artificial Sequence: Synthetic peptide
IEIFGKKAI

SEQ ID NO: 18997 - protein, 9 aa, Artificial Sequence
  Description of Artificial Sequence: Synthetic peptide
VEQMQTDII

SEQ ID NO: 18998 - protein, 11 aa, Artificial Sequence
  Description of Artificial Sequence: Synthetic peptide
AELELAENREI

SEQ ID NO: 18999 - protein, 8 aa, Artificial Sequence
  Description of Artificial Sequence: Synthetic peptide
TEDITGNI

SEQ ID NO: 19000 - protein, 9 aa, Artificial Sequence
  Description of Artificial Sequence: Synthetic peptide
SESAIRGAI

SEQ ID NO: 19001 - protein, 10 aa, Artificial Sequence
  Description of Artificial Sequence: Synthetic peptide
MEDDGREVLM

SEQ ID NO: 19002 - protein, 9 aa, Artificial Sequence
  Description of Artificial Sequence: Synthetic peptide
LEMEKEGKI

SEQ ID NO: 19003 - protein, 9 aa, Artificial Sequence
  Description of Artificial Sequence: Synthetic peptide
DEIYRLLEV

SEQ ID NO: 19004 - protein, 9 aa, Artificial Sequence
  Description of Artificial Sequence: Synthetic peptide
LELEENREI

SEQ ID NO: 19005 - protein, 8 aa, Artificial Sequence
  Description of Artificial Sequence: Synthetic peptide
LEGQVILV

SEQ ID NO: 19006 - protein, 10 aa, Artificial Sequence
  Description of Artificial Sequence: Synthetic peptide
KEQEPPLTSL

SEQ ID NO: 19007 - protein, 8 aa, Artificial Sequence
  Description of Artificial Sequence: Synthetic peptide
SEFNLPPI

SEQ ID NO: 19008 - protein, 9 aa, Artificial Sequence
  Description of Artificial Sequence: Synthetic peptide
IEGAETYYV

SEQ ID NO: 19009 - protein, 8 aa, Artificial Sequence
  Description of Artificial Sequence: Synthetic peptide
FESTHPRI

SEQ ID NO: 19010 - protein, 8 aa, Artificial Sequence
  Description of Artificial Sequence: Synthetic peptide
QEMVMENV

SEQ ID NO: 19011 - protein, 10 aa, Artificial Sequence
  Description of Artificial Sequence: Synthetic peptide
AESFGFGEEI

SEQ ID NO: 19012 - protein, 8 aa, Artificial Sequence
  Description of Artificial Sequence: Synthetic peptide
AEVEEVII

SEQ ID NO: 19013 - protein, 9 aa, Artificial Sequence
  Description of Artificial Sequence: Synthetic peptide
SESAIRKAI

SEQ ID NO: 19014 - protein, 9 aa, Artificial Sequence
  Description of Artificial Sequence: Synthetic peptide
IEVKDTKEA

SEQ ID NO: 19015 - protein, 10 aa, Artificial Sequence
  Description of Artificial Sequence: Synthetic peptide
GEVIGNIRQA

SEQ ID NO: 19016 - protein, 9 aa, Artificial Sequence
  Description of Artificial Sequence: Synthetic peptide
LEAEPIAGA

SEQ ID NO: 19017 - protein, 9 aa, Artificial Sequence
  Description of Artificial Sequence: Synthetic peptide
LETEPIVGA

SEQ ID NO: 19018 - protein, 9 aa, Artificial Sequence
  Description of Artificial Sequence: Synthetic peptide
IEVQDTSEA

SEQ ID NO: 19019 - protein, 9 aa, Artificial Sequence
  Description of Artificial Sequence: Synthetic peptide
LETEPIAGA

SEQ ID NO: 19020 - protein, 10 aa, Artificial Sequence
  Description of Artificial Sequence: Synthetic peptide
SEFNLPPIVA

SEQ ID NO: 19021 - protein, 9 aa, Artificial Sequence
  Description of Artificial Sequence: Synthetic peptide
AETYYIDGA

SEQ ID NO: 19022 - protein, 10 aa, Artificial Sequence
  Description of Artificial Sequence: Synthetic peptide
TEIVPLTKEA

SEQ ID NO: 19023 - protein, 10 aa, Artificial Sequence
  Description of Artificial Sequence: Synthetic peptide
SEVHIPLGEA

SEQ ID NO: 19024 - protein, 9 aa, Artificial Sequence
  Description of Artificial Sequence: Synthetic peptide
TVLEEINLL

SEQ ID NO: 19025 - protein, 11 aa, Artificial Sequence
  Description of Artificial Sequence: Synthetic peptide
TQIDPDLADQL

SEQ ID NO: 19026 - protein, 9 aa, Artificial Sequence
  Description of Artificial Sequence: Synthetic peptide
ASFLGFLGA

SEQ ID NO: 19027 - protein, 9 aa, Artificial Sequence
  Description of Artificial Sequence: Synthetic peptide
EVIGNIRQA

SEQ ID NO: 19028 - protein, 9 aa, Artificial Sequence
  Description of Artificial Sequence: Synthetic peptide
AETYYVDGA

SEQ ID NO: 19029 - protein, 11 aa, Artificial Sequence
  Description of Artificial Sequence: Synthetic peptide
GESPAVLGTGA

SEQ ID NO: 19030 - protein, 10 aa, Artificial Sequence
  Description of Artificial Sequence: Synthetic peptide
ASIEEMMTAC

SEQ ID NO: 19031 - protein, 9 aa, Artificial Sequence
  Description of Artificial Sequence: Synthetic peptide
LETEPIEGA

SEQ ID NO: 19032 - protein, 9 aa, Artificial Sequence
  Description of Artificial Sequence: Synthetic peptide
ASITLTVQA

SEQ ID NO: 19033 - protein, 10 aa, Artificial Sequence
  Description of Artificial Sequence: Synthetic peptide
AEAMSQVTNA

SEQ ID NO: 19034 - protein, 9 aa, Artificial Sequence
  Description of Artificial Sequence: Synthetic peptide
TETLLVQNA

SEQ ID NO: 19035 - protein, 10 aa, Artificial Sequence
  Description of Artificial Sequence: Synthetic peptide
AETYYIDGAA

SEQ ID NO: 19036 - protein, 11 aa, Artificial Sequence
  Description of Artificial Sequence: Synthetic peptide
TQVDPDLADQL

SEQ ID NO: 19037 - protein, 9 aa, Artificial Sequence
  Description of Artificial Sequence: Synthetic peptide
ASIEEMMTA

SEQ ID NO: 19038 - protein, 9 aa, Artificial Sequence
  Description of Artificial Sequence: Synthetic peptide
YEDFRKYTA

SEQ ID NO: 19039 - protein, 10 aa, Artificial Sequence
  Description of Artificial Sequence: Synthetic peptide
AETYYVDGAA

SEQ ID NO: 19040 - protein, 9 aa, Artificial Sequence
  Description of Artificial Sequence: Synthetic peptide
IVARTVELL

SEQ ID NO: 19041 - protein, 10 aa, Artificial Sequence
  Description of Artificial Sequence: Synthetic peptide
REFPPEEARA

SEQ ID NO: 19042 - protein, 9 aa, Artificial Sequence
  Description of Artificial Sequence: Synthetic peptide
SEFNLPPIV

SEQ ID NO: 19043 - protein, 9 aa, Artificial Sequence
  Description of Artificial Sequence: Synthetic peptide
KQVGTLQYL

SEQ ID NO: 19044 - protein, 9 aa, Artificial Sequence
  Description of Artificial Sequence: Synthetic peptide
AEWDRTHPV

SEQ ID NO: 19045 - protein, 9 aa, Artificial Sequence
  Description of Artificial Sequence: Synthetic peptide
SDVKQLTEA

SEQ ID NO: 19046 - protein, 9 aa, Artificial Sequence
  Description of Artificial Sequence: Synthetic peptide
RIIEIVQRA

SEQ ID NO: 19047 - protein, 9 aa, Artificial Sequence
  Description of Artificial Sequence: Synthetic peptide
EEVGFPVRP

SEQ ID NO: 19048 - protein, 9 aa, Artificial Sequence
  Description of Artificial Sequence: Synthetic peptide
NQVGSLQYL

SEQ ID NO: 19049 - protein, 11 aa, Artificial Sequence
  Description of Artificial Sequence: Synthetic peptide
TQVEPGLADQL

SEQ ID NO: 19050 - protein, 9 aa, Artificial Sequence
  Description of Artificial Sequence: Synthetic peptide
VVAEGTDRI

SEQ ID NO: 19051 - protein, 10 aa, Artificial Sequence
  Description of Artificial Sequence: Synthetic peptide
YESTNPKTSS

SEQ ID NO: 19052 - protein, 8 aa, Artificial Sequence
  Description of Artificial Sequence: Synthetic peptide
TAFTIPSI

SEQ ID NO: 19053 - protein, 9 aa, Artificial Sequence
  Description of Artificial Sequence: Synthetic peptide
LPISPIETV

SEQ ID NO: 19054 - protein, 9 aa, Artificial Sequence
  Description of Artificial Sequence: Synthetic peptide
FPISPIETV

SEQ ID NO: 19055 - protein, 9 aa, Artificial Sequence
  Description of Artificial Sequence: Synthetic peptide
MPNDTGKNI

SEQ ID NO: 19056 - protein, 8 aa, Artificial Sequence
  Description of Artificial Sequence: Synthetic peptide
IPVESSTV

SEQ ID NO: 19057 - protein, 8 aa, Artificial Sequence
  Description of Artificial Sequence: Synthetic peptide
VPVNPQEV

SEQ ID NO: 19058 - protein, 8 aa, Artificial Sequence
  Description of Artificial Sequence: Synthetic peptide
YPAGHKQV

SEQ ID NO: 19059 - protein, 10 aa, Artificial Sequence
  Description of Artificial Sequence: Synthetic peptide
IPYNPQSQGV

SEQ ID NO: 19060 - protein, 9 aa, Artificial Sequence
  Description of Artificial Sequence: Synthetic peptide
SPLSFQTLI

SEQ ID NO: 19061 - protein, 9 aa, Artificial Sequence
  Description of Artificial Sequence: Synthetic peptide
LPPIVAKEI

SEQ ID NO: 19062 - protein, 8 aa, Artificial Sequence
  Description of Artificial Sequence: Synthetic peptide
DSWTVNDI

SEQ ID NO: 19063 - protein, 9 aa, Artificial Sequence
  Description of Artificial Sequence: Synthetic peptide
TALVAPKKI

SEQ ID NO: 19064 - protein, 8 aa, Artificial Sequence
  Description of Artificial Sequence: Synthetic peptide
VPVDPQEV

SEQ ID NO: 19065 - protein, 9 aa, Artificial Sequence
  Description of Artificial Sequence: Synthetic peptide
IPLGDARLV

SEQ ID NO: 19066 - protein, 8 aa, Artificial Sequence
  Description of Artificial Sequence: Synthetic peptide
IPVDPQEV

SEQ ID NO: 19067 - protein, 9 aa, Artificial Sequence
  Description of Artificial Sequence: Synthetic peptide
YAPPIKGSI

SEQ ID NO: 19068 - protein, 8 aa, Artificial Sequence
  Description of Artificial Sequence: Synthetic peptide
TAYFILKL

SEQ ID NO: 19069 - protein, 9 aa, Artificial Sequence
  Description of Artificial Sequence: Synthetic peptide
IPLGEARLV

SEQ ID NO: 19070 - protein, 8 aa, Artificial Sequence
  Description of Artificial Sequence: Synthetic peptide
TSFNFPQI

SEQ ID NO: 19071 - protein, 9 aa, Artificial Sequence
  Description of Artificial Sequence: Synthetic peptide
SPLSLQTLI

SEQ ID NO: 19072 - protein, 9 aa, Artificial Sequence
  Description of Artificial Sequence: Synthetic peptide
TVLSIINSV

SEQ ID NO: 19073 - protein, 9 aa, Artificial Sequence
  Description of Artificial Sequence: Synthetic peptide
DAYFSVPLY

SEQ ID NO: 19074 - protein, 11 aa, Artificial Sequence
  Description of Artificial Sequence: Synthetic peptide
IPYNPQSQGVV

SEQ ID NO: 19075 - protein, 9 aa, Artificial Sequence
  Description of Artificial Sequence: Synthetic peptide
SPLSFQTLV

SEQ ID NO: 19076 - protein, 8 aa, Artificial Sequence
  Description of Artificial Sequence: Synthetic peptide
SPVSILDI

SEQ ID NO: 19077 - protein, 9 aa, Artificial Sequence
  Description of Artificial Sequence: Synthetic peptide
FPISPIETV

SEQ ID NO: 19078 - protein, 9 aa, Artificial Sequence
  Description of Artificial Sequence: Synthetic peptide
LPISPIETV

SEQ ID NO: 19079 - protein, 9 aa, Artificial Sequence
  Description of Artificial Sequence: Synthetic peptide
NPYSTPIFA

SEQ ID NO: 19080 - protein, 9 aa, Artificial Sequence
  Description of Artificial Sequence: Synthetic peptide
EPIPIHYCA

SEQ ID NO: 19081 - protein, 10 aa, Artificial Sequence
  Description of Artificial Sequence: Synthetic peptide
EPLGIAPTKA

SEQ ID NO: 19082 - protein, 9 aa, Artificial Sequence
  Description of Artificial Sequence: Synthetic peptide
HVASGYIEA

SEQ ID NO: 19083 - protein, 9 aa, Artificial Sequence
  Description of Artificial Sequence: Synthetic peptide
NPYNTPIFA

SEQ ID NO: 19084 - protein, 10 aa, Artificial Sequence
  Description of Artificial Sequence: Synthetic peptide
YPEPAGTRQA

SEQ ID NO: 19085 - protein, 9 aa, Artificial Sequence
  Description of Artificial Sequence: Synthetic peptide
HPGSQPKTA

SEQ ID NO: 19086 - protein, 11 aa, Artificial Sequence
  Description of Artificial Sequence: Synthetic peptide
FALNPGLLESA

SEQ ID NO: 19087 - protein, 9 aa, Artificial Sequence
  Description of Artificial Sequence: Synthetic peptide
EAMSQVTNA

SEQ ID NO: 19088 - protein, 9 aa, Artificial Sequence
  Description of Artificial Sequence: Synthetic peptide
HPGSQPQTA

SEQ ID NO: 19089 - protein, 10 aa, Artificial Sequence
  Description of Artificial Sequence: Synthetic peptide
EPLGVAPTEA

SEQ ID NO: 19090 - protein, 8 aa, Artificial Sequence
  Description of Artificial Sequence: Synthetic peptide
TAFTIPSI

SEQ ID NO: 19091 - protein, 9 aa, Artificial Sequence
  Description of Artificial Sequence: Synthetic peptide
DPIPIHYCA

SEQ ID NO: 19092 - protein, 9 aa, Artificial Sequence
  Description of Artificial Sequence: Synthetic peptide
SPAVLGTGA

SEQ ID NO: 19093 - protein, 9 aa, Artificial Sequence
  Description of Artificial Sequence: Synthetic peptide
HPGSQPRTA

SEQ ID NO: 19094 - protein, 11 aa, Artificial Sequence
  Description of Artificial Sequence: Synthetic peptide
VPVDPQDVEKA

SEQ ID NO: 19095 - protein, 9 aa, Artificial Sequence
  Description of Artificial Sequence: Synthetic peptide
EPVAEGVGA

SEQ ID NO: 19096 - protein, 9 aa, Artificial Sequence
  Description of Artificial Sequence: Synthetic peptide
YPIVQNAQG

SEQ ID NO: 19097 - protein, 8 aa, Artificial Sequence
  Description of Artificial Sequence: Synthetic peptide
TAFTIPST

SEQ ID NO: 19098 - protein, 11 aa, Artificial Sequence
  Description of Artificial Sequence: Synthetic peptide
FPISPIETVPV

SEQ ID NO: 19099 - protein, 9 aa, Artificial Sequence
  Description of Artificial Sequence: Synthetic peptide
FPDWHNYTP

SEQ ID NO: 19100 - protein, 11 aa, Artificial Sequence
  Description of Artificial Sequence: Synthetic peptide
VPVDPQEVEKA

SEQ ID NO: 19101 - protein, 11 aa, Artificial Sequence
  Description of Artificial Sequence: Synthetic peptide
MPNDTGKNITL

SEQ ID NO: 19102 - protein, 11 aa, Artificial Sequence
  Description of Artificial Sequence: Synthetic peptide
MLNTVGGHQAA

SEQ ID NO: 19103 - protein, 10 aa, Artificial Sequence
  Description of Artificial Sequence: Synthetic peptide
IPAETGKETA

SEQ ID NO: 19104 - protein, 9 aa, Artificial Sequence
  Description of Artificial Sequence: Synthetic peptide
EVIGNIRQA

SEQ ID NO: 19105 - protein, 9 aa, Artificial Sequence
  Description of Artificial Sequence: Synthetic peptide
HPVHAGPIP

SEQ ID NO: 19106 - protein, 11 aa, Artificial Sequence
  Description of Artificial Sequence: Synthetic peptide
YPHLLSGGILI

SEQ ID NO: 19107 - protein, 10 aa, Artificial Sequence
  Description of Artificial Sequence: Synthetic peptide
HPVHAGPIPP

SEQ ID NO: 19108 - protein, 9 aa, Artificial Sequence
  Description of Artificial Sequence: Synthetic peptide
ASFLGFLGA

SEQ ID NO: 19109 - protein, 9 aa, Artificial Sequence
  Description of Artificial Sequence: Synthetic peptide
LPISPIETV

SEQ ID NO: 19110 - protein, 9 aa, Artificial Sequence
  Description of Artificial Sequence: Synthetic peptide
FPISPIETV

SEQ ID NO: 19111 - protein, 9 aa, Artificial Sequence
  Description of Artificial Sequence: Synthetic peptide
RPEPTAPPA

SEQ ID NO: 19112 - protein, 9 aa, Artificial Sequence
  Description of Artificial Sequence: Synthetic peptide
SPAVLGTGA

SEQ ID NO: 19113 - protein, 10 aa, Artificial Sequence
  Description of Artificial Sequence: Synthetic peptide
YPEPAGTRQA

SEQ ID NO: 19114 - protein, 9 aa, Artificial Sequence
  Description of Artificial Sequence: Synthetic peptide
SPAVLGTGA

SEQ ID NO: 19115 - protein, 9 aa, Artificial Sequence
  Description of Artificial Sequence: Synthetic peptide
LPISPIETV

SEQ ID NO: 19116 - protein, 9 aa, Artificial Sequence
  Description of Artificial Sequence: Synthetic peptide
FPISPIETV

SEQ ID NO: 19117 - protein, 10 aa, Artificial Sequence
  Description of Artificial Sequence: Synthetic peptide
IPAETGKETA

SEQ ID NO: 19118 - protein, 10 aa, Artificial Sequence
  Description of Artificial Sequence: Synthetic peptide
IPAETGQETA

SEQ ID NO: 19119 - protein, 9 aa, Artificial Sequence
  Description of Artificial Sequence: Synthetic peptide
SPIETVPVT

SEQ ID NO: 19120 - protein, 11 aa, Artificial Sequence
  Description of Artificial Sequence: Synthetic peptide
VPVDPQDVEKA

SEQ ID NO: 19121 - protein, 9 aa, Artificial Sequence
  Description of Artificial Sequence: Synthetic peptide
NPYNTPIFA

SEQ ID NO: 19122 - protein, 9 aa, Artificial Sequence
  Description of Artificial Sequence: Synthetic peptide
HPGSQPQTA

SEQ ID NO: 19123 - protein, 9 aa, Artificial Sequence
  Description of Artificial Sequence: Synthetic peptide
RPEPTAPPA

SEQ ID NO: 19124 - protein, 9 aa, Artificial Sequence
  Description of Artificial Sequence: Synthetic peptide
NPYSTPIFA

SEQ ID NO: 19125 - protein, 10 aa, Artificial Sequence
  Description of Artificial Sequence: Synthetic peptide
EPLGVAPTEA

SEQ ID NO: 19126 - protein, 10 aa, Artificial Sequence
  Description of Artificial Sequence: Synthetic peptide
EPLGIAPTKA

SEQ ID NO: 19127 - protein, 11 aa, Artificial Sequence
  Description of Artificial Sequence: Synthetic peptide
MPNDTGKNITL

SEQ ID NO: 19128 - protein, 10 aa, Artificial Sequence
  Description of Artificial Sequence: Synthetic peptide
KPNSGGDMEV

SEQ ID NO: 19129 - protein, 9 aa, Artificial Sequence
  Description of Artificial Sequence: Synthetic peptide
EPVAEGVGA

SEQ ID NO: 19130 - protein, 11 aa, Artificial Sequence
  Description of Artificial Sequence: Synthetic peptide
VPVDPQEVEKA

SEQ ID NO: 19131 - protein, 10 aa, Artificial Sequence
  Description of Artificial Sequence: Synthetic peptide
YPEPAGTRQA

SEQ ID NO: 19132 - protein, 9 aa, Artificial Sequence
  Description of Artificial Sequence: Synthetic peptide
HPGSQPKTA

SEQ ID NO: 19133 - protein, 8 aa, Artificial Sequence
  Description of Artificial Sequence: Synthetic peptide
VPVNPQEV

SEQ ID NO: 19134 - protein, 10 aa, Artificial Sequence
  Description of Artificial Sequence: Synthetic peptide
SPIETVPVTL

SEQ ID NO: 19135 - protein, 10 aa, Artificial Sequence
  Description of Artificial Sequence: Synthetic peptide
IPYNPQSQGV

SEQ ID NO: 19136 - protein, 9 aa, Artificial Sequence
  Description of Artificial Sequence: Synthetic peptide
LPISPIETV

SEQ ID NO: 19137 - protein, 9 aa, Artificial Sequence
  Description of Artificial Sequence: Synthetic peptide
FPISPIETV

SEQ ID NO: 19138 - protein, 9 aa, Artificial Sequence
  Description of Artificial Sequence: Synthetic peptide
SPAVLGTGA

SEQ ID NO: 19139 - protein, 10 aa, Artificial Sequence
  Description of Artificial Sequence: Synthetic peptide
IPAETGKETA

SEQ ID NO: 19140 - protein, 11 aa, Artificial Sequence
  Description of Artificial Sequence: Synthetic peptide
VPVDPQDVEKA

SEQ ID NO: 19141 - protein, 10 aa, Artificial Sequence
  Description of Artificial Sequence: Synthetic peptide
IPYNPQSQGV

SEQ ID NO: 19142 - protein, 11 aa, Artificial Sequence
  Description of Artificial Sequence: Synthetic peptide
VPVDPQEVEKA

SEQ ID NO: 19143 - protein, 10 aa, Artificial Sequence
  Description of Artificial Sequence: Synthetic peptide
APAGFAILKC

SEQ ID NO: 19144 - protein, 9 aa, Artificial Sequence
  Description of Artificial Sequence: Synthetic peptide
SPIETVPVT

SEQ ID NO: 19145 - protein, 9 aa, Artificial Sequence
  Description of Artificial Sequence: Synthetic peptide
NPYSTPIFA

SEQ ID NO: 19146 - protein, 10 aa, Artificial Sequence
  Description of Artificial Sequence: Synthetic peptide
RPLVTVKIEG

SEQ ID NO: 19147 - protein, 8 aa, Artificial Sequence
  Description of Artificial Sequence: Synthetic peptide
VPVNPQEV

SEQ ID NO: 19148 - protein, 10 aa, Artificial Sequence
  Description of Artificial Sequence: Synthetic peptide
IPAETGQETA

SEQ ID NO: 19149 - protein, 10 aa, Artificial Sequence
  Description of Artificial Sequence: Synthetic peptide
KPNSGGDMEV

SEQ ID NO: 19150 - protein, 9 aa, Artificial Sequence
  Description of Artificial Sequence: Synthetic peptide
RPEPTAPPA

SEQ ID NO: 19151 - protein, 10 aa, Artificial Sequence
  Description of Artificial Sequence: Synthetic peptide
RPNNNTRTSI

SEQ ID NO: 19152 - protein, 10 aa, Artificial Sequence
  Description of Artificial Sequence: Synthetic peptide
SPEVIPMFSA

SEQ ID NO: 19153 - protein, 9 aa, Artificial Sequence
  Description of Artificial Sequence: Synthetic peptide
HPGSQPKTA

SEQ ID NO: 19154 - protein, 9 aa, Artificial Sequence
  Description of Artificial Sequence: Synthetic peptide
HPGSQPQTA

SEQ ID NO: 19155 - protein, 10 aa, Artificial Sequence
  Description of Artificial Sequence: Synthetic peptide
EPLGIAPTKA

SEQ ID NO: 19156 - protein, 9 aa, Artificial Sequence
  Description of Artificial Sequence: Synthetic peptide
NPYNTPIFA

SEQ ID NO: 19157 - protein, 11 aa, Artificial Sequence
  Description of Artificial Sequence: Synthetic peptide
KAYEPEKHNVW

SEQ ID NO: 19158 - protein, 9 aa, Artificial Sequence
  Description of Artificial Sequence: Synthetic peptide
TTKLFNSTW

SEQ ID NO: 19159 - protein, 9 aa, Artificial Sequence
  Description of Artificial Sequence: Synthetic peptide
LSFPQITLW

SEQ ID NO: 19160 - protein, 11 aa, Artificial Sequence
  Description of Artificial Sequence: Synthetic peptide
KAYETEKHNVW

SEQ ID NO: 19161 - protein, 9 aa, Artificial Sequence
  Description of Artificial Sequence: Synthetic peptide
TSRLFNSTW

SEQ ID NO: 19162 - protein, 11 aa, Artificial Sequence
  Description of Artificial Sequence: Synthetic peptide
KAYSTEKHNVW

SEQ ID NO: 19163 - protein, 11 aa, Artificial Sequence
  Description of Artificial Sequence: Synthetic peptide
KAYDTERHNVW

SEQ ID NO: 19164 - protein, 9 aa, Artificial Sequence
  Description of Artificial Sequence: Synthetic peptide
KIKQIVNMW

SEQ ID NO: 19165 - protein, 9 aa, Artificial Sequence
  Description of Artificial Sequence: Synthetic peptide
NTKNIIVQF

SEQ ID NO: 19166 - protein, 10 aa, Artificial Sequence
  Description of Artificial Sequence: Synthetic peptide
TTNVPWNSTW

SEQ ID NO: 19167 - protein, 9 aa, Artificial Sequence
  Description of Artificial Sequence: Synthetic peptide
KTETDPFDW

SEQ ID NO: 19168 - protein, 9 aa, Artificial Sequence
  Description of Artificial Sequence: Synthetic peptide
STLQEQVAW

SEQ ID NO: 19169 - protein, 9 aa, Artificial Sequence
  Description of Artificial Sequence: Synthetic peptide
RIKQIVNMW

SEQ ID NO: 19170 - protein, 10 aa, Artificial Sequence
  Description of Artificial Sequence: Synthetic peptide
TTNVPWNSSW

SEQ ID NO: 19171 - protein, 9 aa, Artificial Sequence
  Description of Artificial Sequence: Synthetic peptide
KIKQIINMW

SEQ ID NO: 19172 - protein, 9 aa, Artificial Sequence
  Description of Artificial Sequence: Synthetic peptide
RSIRLVNGF

SEQ ID NO: 19173 - protein, 10 aa, Artificial Sequence
  Description of Artificial Sequence: Synthetic peptide
KQRQDILDLW

SEQ ID NO: 19174 - protein, 11 aa, Artificial Sequence
  Description of Artificial Sequence: Synthetic peptide
ASKTETDPFDW

SEQ ID NO: 19175 - protein, 9 aa, Artificial Sequence
  Description of Artificial Sequence: Synthetic peptide
YSTEKHNVW

SEQ ID NO: 19176 - protein, 9 aa, Artificial Sequence
  Description of Artificial Sequence: Synthetic peptide
STLQEQIAW

SEQ ID NO: 19177 - protein, 10 aa, Artificial Sequence
  Description of Artificial Sequence: Synthetic peptide
RIIELVQRAW

SEQ ID NO: 19178 - protein, 10 aa, Artificial Sequence
  Description of Artificial Sequence: Synthetic peptide
NTSRLFNSTW

SEQ ID NO: 19179 - protein, 10 aa, Artificial Sequence
  Description of Artificial Sequence: Synthetic peptide
RIIEIVQRAW

SEQ ID NO: 19180 - protein, 10 aa, Artificial Sequence
  Description of Artificial Sequence: Synthetic peptide
TVKLPEKDSW

SEQ ID NO: 19181 - protein, 11 aa, Artificial Sequence
  Description of Artificial Sequence: Synthetic peptide
TSFNFPQITLW

SEQ ID NO: 19182 - protein, 10 aa, Artificial Sequence
  Description of Artificial Sequence: Synthetic peptide
KIATESIVIW

SEQ ID NO: 19183 - protein, 9 aa, Artificial Sequence
  Description of Artificial Sequence: Synthetic peptide
ISTESIVIW

SEQ ID NO: 19184 - protein, 9 aa, Artificial Sequence
  Description of Artificial Sequence: Synthetic peptide
RAKELHPEF

SEQ ID NO: 19185 - protein, 9 aa, Artificial Sequence
  Description of Artificial Sequence: Synthetic peptide
TSGLFNSSW

SEQ ID NO: 19186 - protein, 10 aa, Artificial Sequence
  Description of Artificial Sequence: Synthetic peptide
VTVYYGVPVW

SEQ ID NO: 19187 - protein, 9 aa, Artificial Sequence
  Description of Artificial Sequence: Synthetic peptide
IIVIVQRAW

SEQ ID NO: 19188 - protein, 9 aa, Artificial Sequence
  Description of Artificial Sequence: Synthetic peptide
LGHGVSIEW

SEQ ID NO: 19189 - protein, 9 aa, Artificial Sequence
  Description of Artificial Sequence: Synthetic peptide
RSVRLVNGF

SEQ ID NO: 19190 - protein, 9 aa, Artificial Sequence
  Description of Artificial Sequence: Synthetic peptide
RTKPPLPSV

SEQ ID NO: 19191 - protein, 11 aa, Artificial Sequence
  Description of Artificial Sequence: Synthetic peptide
KSIRIGPGQAF

SEQ ID NO: 19192 - protein, 9 aa, Artificial Sequence
  Description of Artificial Sequence: Synthetic peptide
RVMETQRNY

SEQ ID NO: 19193 - protein, 9 aa, Artificial Sequence
  Description of Artificial Sequence: Synthetic peptide
KTKPPLPSV

SEQ ID NO: 19194 - protein, 11 aa, Artificial Sequence
  Description of Artificial Sequence: Synthetic peptide
SVLSGGKLDAW

SEQ ID NO: 19195 - protein, 10 aa, Artificial Sequence
  Description of Artificial Sequence: Synthetic peptide
KISTESIVIW

SEQ ID NO: 19196 - protein, 9 aa, Artificial Sequence
  Description of Artificial Sequence: Synthetic peptide
QATQDVKNW

SEQ ID NO: 19197 - protein, 9 aa, Artificial Sequence
  Description of Artificial Sequence: Synthetic peptide
KTAVQMAVF

SEQ ID NO: 19198 - protein, 8 aa, Artificial Sequence
  Description of Artificial Sequence: Synthetic peptide
ISKKANRW

SEQ ID NO: 19199 - protein, 11 aa, Artificial Sequence
  Description of Artificial Sequence: Synthetic peptide
TTSTLQEQVAW

SEQ ID NO: 19200 - protein, 9 aa, Artificial Sequence
  Description of Artificial Sequence: Synthetic peptide
WSKSSIVGW

SEQ ID NO: 19201 - protein, 9 aa, Artificial Sequence
  Description of Artificial Sequence: Synthetic peptide
RSTPLVSGF

SEQ ID NO: 19202 - protein, 9 aa, Artificial Sequence
  Description of Artificial Sequence: Synthetic peptide
FSVPLDKEF

SEQ ID NO: 19203 - protein, 9 aa, Artificial Sequence
  Description of Artificial Sequence: Synthetic peptide
STLQEQVAW

SEQ ID NO: 19204 - protein, 10 aa, Artificial Sequence
  Description of Artificial Sequence: Synthetic peptide
TAATNPDVAW

SEQ ID NO: 19205 - protein, 9 aa, Artificial Sequence
  Description of Artificial Sequence: Synthetic peptide
TSGLFNSSW

SEQ ID NO: 19206 - protein, 9 aa, Artificial Sequence
  Description of Artificial Sequence: Synthetic peptide
RSTPLVSGF

SEQ ID NO: 19207 - protein, 11 aa, Artificial Sequence
  Description of Artificial Sequence: Synthetic peptide
KTGTEDLQSLY

SEQ ID NO: 19208 - protein, 8 aa, Artificial Sequence
  Description of Artificial Sequence: Synthetic peptide
ASAENYTF

SEQ ID NO: 19209 - protein, 9 aa, Artificial Sequence
  Description of Artificial Sequence: Synthetic peptide
KQISQIQKF

SEQ ID NO: 19210 - protein, 9 aa, Artificial Sequence
  Description of Artificial Sequence: Synthetic peptide
AATNPDVAW

SEQ ID NO: 19211 - protein, 9 aa, Artificial Sequence
  Description of Artificial Sequence: Synthetic peptide
RAVGMGASF

SEQ ID NO: 19212 - protein, 9 aa, Artificial Sequence
  Description of Artificial Sequence: Synthetic peptide
KQISNIQKF

SEQ ID NO: 19213 - protein, 9 aa, Artificial Sequence
  Description of Artificial Sequence: Synthetic peptide
STLQEQIAW

SEQ ID NO: 19214 - protein, 10 aa, Artificial Sequence
  Description of Artificial Sequence: Synthetic peptide
TADRNPDSAW

SEQ ID NO: 19215 - protein, 8 aa, Artificial Sequence
  Description of Artificial Sequence: Synthetic peptide
IEIITHSF

SEQ ID NO: 19216 - protein, 9 aa, Artificial Sequence
  Description of Artificial Sequence: Synthetic peptide
YSTQVEPGL

SEQ ID NO: 19217 - protein, 9 aa, Artificial Sequence
  Description of Artificial Sequence: Synthetic peptide
KGNNDNVTF

SEQ ID NO: 19218 - protein, 9 aa, Artificial Sequence
  Description of Artificial Sequence: Synthetic peptide
KAQVQHEKY

SEQ ID NO: 19219 - protein, 9 aa, Artificial Sequence
  Description of Artificial Sequence: Synthetic peptide
NSSYTNDTY

SEQ ID NO: 19220 - protein, 9 aa, Artificial Sequence
  Description of Artificial Sequence: Synthetic peptide
RAIQAQQHM

SEQ ID NO: 19221 - protein, 9 aa, Artificial Sequence
  Description of Artificial Sequence: Synthetic peptide
YSTQVDPGL

SEQ ID NO: 19222 - protein, 11 aa, Artificial Sequence
  Description of Artificial Sequence: Synthetic peptide
KSIRIGPGQAF

SEQ ID NO: 19223 - protein, 8 aa, Artificial Sequence
  Description of Artificial Sequence: Synthetic peptide
ITGLILTY

SEQ ID NO: 19224 - protein, 9 aa, Artificial Sequence
  Description of Artificial Sequence: Synthetic peptide
NASAENYTF

SEQ ID NO: 19225 - protein, 9 aa, Artificial Sequence
  Description of Artificial Sequence: Synthetic peptide
KTKPPLPSV

SEQ ID NO: 19226 - protein, 11 aa, Artificial Sequence
  Description of Artificial Sequence: Synthetic peptide
KAYEPEKHNVW

SEQ ID NO: 19227 - protein, 9 aa, Artificial Sequence
  Description of Artificial Sequence: Synthetic peptide
KTAVQMAVF

SEQ ID NO: 19228 - protein, 9 aa, Artificial Sequence
  Description of Artificial Sequence: Synthetic peptide
RTKPPLPSV

SEQ ID NO: 19229 - protein, 8 aa, Artificial Sequence
  Description of Artificial Sequence: Synthetic peptide
GQGVSIEW

SEQ ID NO: 19230 - protein, 9 aa, Artificial Sequence
  Description of Artificial Sequence: Synthetic peptide
QATQDVKNW

SEQ ID NO: 19231 - protein, 9 aa, Artificial Sequence
  Description of Artificial Sequence: Synthetic peptide
TINEEAAEW

SEQ ID NO: 19232 - protein, 9 aa, Artificial Sequence
  Description of Artificial Sequence: Synthetic peptide
RSVRLVNGF

SEQ ID NO: 19233 - protein, 8 aa, Artificial Sequence
  Description of Artificial Sequence: Synthetic peptide
NSPTSREL

SEQ ID NO: 19234 - protein, 9 aa, Artificial Sequence
  Description of Artificial Sequence: Synthetic peptide
YSPLSFQTL

SEQ ID NO: 19235 - protein, 9 aa, Artificial Sequence
  Description of Artificial Sequence: Synthetic peptide
YSPLSLQTL

SEQ ID NO: 19236 - protein, 9 aa, Artificial Sequence
  Description of Artificial Sequence: Synthetic peptide
ITPSPRQEL

SEQ ID NO: 19237 - protein, 8 aa, Artificial Sequence
  Description of Artificial Sequence: Synthetic peptide
SSPSANEL

SEQ ID NO: 19238 - protein, 8 aa, Artificial Sequence
  Description of Artificial Sequence: Synthetic peptide
NSPTSRML

SEQ ID NO: 19239 - protein, 9 aa, Artificial Sequence
  Description of Artificial Sequence: Synthetic peptide
YSPVSILDI

SEQ ID NO: 19240 - protein, 10 aa, Artificial Sequence
  Description of Artificial Sequence: Synthetic peptide
YIIGIGIGAL

SEQ ID NO: 19241 - protein, 9 aa, Artificial Sequence
  Description of Artificial Sequence: Synthetic peptide
SIVARTVEL

SEQ ID NO: 19242 - protein, 9 aa, Artificial Sequence
  Description of Artificial Sequence: Synthetic peptide
MTPPPKQEM

SEQ ID NO: 19243 - protein, 9 aa, Artificial Sequence
  Description of Artificial Sequence: Synthetic peptide
FSVPLHEDF

SEQ ID NO: 19244 - protein, 9 aa, Artificial Sequence
  Description of Artificial Sequence: Synthetic peptide
KQISNIQKF

SEQ ID NO: 19245 - protein, 11 aa, Artificial Sequence
  Description of Artificial Sequence: Synthetic peptide
KAYEPEKHNVW

SEQ ID NO: 19246 - protein, 11 aa, Artificial Sequence
  Description of Artificial Sequence: Synthetic peptide
ETEPIAGAETY

SEQ ID NO: 19247 - protein, 9 aa, Artificial Sequence
  Description of Artificial Sequence: Synthetic peptide
DARLVITTY

SEQ ID NO: 19248 - protein, 11 aa, Artificial Sequence
  Description of Artificial Sequence: Synthetic peptide
ETEPIVGAETY

SEQ ID NO: 19249 - protein, 11 aa, Artificial Sequence
  Description of Artificial Sequence: Synthetic peptide
EAEPIAGAETY

SEQ ID NO: 19250 - protein, 9 aa, Artificial Sequence
  Description of Artificial Sequence: Synthetic peptide
EARLVITTY

SEQ ID NO: 19251 - protein, 11 aa, Artificial Sequence
  Description of Artificial Sequence: Synthetic peptide
ETEPIEGAETY

SEQ ID NO: 19252 - protein, 9 aa, Artificial Sequence
  Description of Artificial Sequence: Synthetic peptide
GTEDLQSLY

SEQ ID NO: 19253 - protein, 8 aa, Artificial Sequence
  Description of Artificial Sequence: Synthetic peptide
VLDVGDAY

SEQ ID NO: 19254 - protein, 9 aa, Artificial Sequence
  Description of Artificial Sequence: Synthetic peptide
ISVEPPAVL

SEQ ID NO: 19255 - protein, 9 aa, Artificial Sequence
  Description of Artificial Sequence: Synthetic peptide
AALDLSHFL

SEQ ID NO: 19256 - protein, 9 aa, Artificial Sequence
  Description of Artificial Sequence: Synthetic peptide
YSTQVDPDL

SEQ ID NO: 19257 - protein, 9 aa, Artificial Sequence
  Description of Artificial Sequence: Synthetic peptide
LALDKWASL

SEQ ID NO: 19258 - protein, 9 aa, Artificial Sequence
  Description of Artificial Sequence: Synthetic peptide
ATDIPTKEL

SEQ ID NO: 19259 - protein, 9 aa, Artificial Sequence
  Description of Artificial Sequence: Synthetic peptide
AALDLSHFL

SEQ ID NO: 19260 - protein, 9 aa, Artificial Sequence
  Description of Artificial Sequence: Synthetic peptide
YSTQVDPDL

SEQ ID NO: 19261 - protein, 9 aa, Artificial Sequence
  Description of Artificial Sequence: Synthetic peptide
LIVARTVEL

SEQ ID NO: 19262 - protein, 9 aa, Artificial Sequence
  Description of Artificial Sequence: Synthetic peptide
ISVEPPAVL

SEQ ID NO: 19263 - protein, 9 aa, Artificial Sequence
  Description of Artificial Sequence: Synthetic peptide
YSTQIDPDL

SEQ ID NO: 19264 - protein, 9 aa, Artificial Sequence
  Description of Artificial Sequence: Synthetic peptide
SIVARTVEL

SEQ ID NO: 19265 - protein, 9 aa, Artificial Sequence
  Description of Artificial Sequence: Synthetic peptide
SSMEAGGEL

SEQ ID NO: 19266 - protein, 9 aa, Artificial Sequence
  Description of Artificial Sequence: Synthetic peptide
LIVVRTVEL

SEQ ID NO: 19267 - protein, 9 aa, Artificial Sequence
  Description of Artificial Sequence: Synthetic peptide
ATDIQTKEL

SEQ ID NO: 19268 - protein, 9 aa, Artificial Sequence
  Description of Artificial Sequence: Synthetic peptide
YVDRFFKTL

SEQ ID NO: 19269 - protein, 9 aa, Artificial Sequence
  Description of Artificial Sequence: Synthetic peptide
YSTQVDPGL

SEQ ID NO: 19270 - protein, 9 aa, Artificial Sequence
  Description of Artificial Sequence: Synthetic peptide
AAEGQGTSL

SEQ ID NO: 19271 - protein, 8 aa, Artificial Sequence
  Description of Artificial Sequence: Synthetic peptide
AFDLSHFL

SEQ ID NO: 19272 - protein, 9 aa, Artificial Sequence
  Description of Artificial Sequence: Synthetic peptide
VLDVGGAYF

SEQ ID NO: 19273 - protein, 9 aa, Artificial Sequence
  Description of Artificial Sequence: Synthetic peptide
YYDPSKELI

SEQ ID NO: 19274 - protein, 9 aa, Artificial Sequence
  Description of Artificial Sequence: Synthetic peptide
YFDNKTIIL

SEQ ID NO: 19275 - protein, 8 aa, Artificial Sequence
  Description of Artificial Sequence: Synthetic peptide
HTDNGTNF

SEQ ID NO: 19276 - protein, 9 aa, Artificial Sequence
  Description of Artificial Sequence: Synthetic peptide
QYDQVAIEI

SEQ ID NO: 19277 - protein, 9 aa, Artificial Sequence
  Description of Artificial Sequence: Synthetic peptide
SFDPIPIHY

SEQ ID NO: 19278 - protein, 10 aa, Artificial Sequence
  Description of Artificial Sequence: Synthetic peptide
YVDNGTNVTL

SEQ ID NO: 19279 - protein, 8 aa, Artificial Sequence
  Description of Artificial Sequence: Synthetic peptide
HTDNGTNF

SEQ ID NO: 19280 - protein, 9 aa, Artificial Sequence
  Description of Artificial Sequence: Synthetic peptide
VLDVGGAYF

SEQ ID NO: 19281 - protein, 8 aa, Artificial Sequence
  Description of Artificial Sequence: Synthetic peptide
YVDNGTNV

SEQ ID NO: 19282 - protein, 8 aa, Artificial Sequence
  Description of Artificial Sequence: Synthetic peptide
HTDNGSNF

SEQ ID NO: 19283 - protein, 9 aa, Artificial Sequence
  Description of Artificial Sequence: Synthetic peptide
ATDIPTKEL

SEQ ID NO: 19284 - protein, 9 aa, Artificial Sequence
  Description of Artificial Sequence: Synthetic peptide
IQDNSEIKV

SEQ ID NO: 19285 - protein, 8 aa, Artificial Sequence
  Description of Artificial Sequence: Synthetic peptide
YTDEIYRL

SEQ ID NO: 19286 - protein, 9 aa, Artificial Sequence
  Description of Artificial Sequence: Synthetic peptide
AAEGQGTSL

SEQ ID NO: 19287 - protein, 9 aa, Artificial Sequence
  Description of Artificial Sequence: Synthetic peptide
VLDVGDAYF

SEQ ID NO: 19288 - protein, 8 aa, Artificial Sequence
  Description of Artificial Sequence: Synthetic peptide
WADIHQEF

SEQ ID NO: 19289 - protein, 9 aa, Artificial Sequence
  Description of Artificial Sequence: Synthetic peptide
QRPLVTVKI

SEQ ID NO: 19290 - protein, 9 aa, Artificial Sequence
  Description of Artificial Sequence: Synthetic peptide
IRAISERIL

SEQ ID NO: 19291 - protein, 9 aa, Artificial Sequence
  Description of Artificial Sequence: Synthetic peptide
DARLVITTY

SEQ ID NO: 19292 - protein, 10 aa, Artificial Sequence
  Description of Artificial Sequence: Synthetic peptide
YVDNGTNVTL

SEQ ID NO: 19293 - protein, 8 aa, Artificial Sequence
  Description of Artificial Sequence: Synthetic peptide
DQLIHTHY

SEQ ID NO: 19294 - protein, 9 aa, Artificial Sequence
  Description of Artificial Sequence: Synthetic peptide
TLRPGGGDM

SEQ ID NO: 19295 - protein, 9 aa, Artificial Sequence
  Description of Artificial Sequence: Synthetic peptide
EARLVITTY

SEQ ID NO: 19296 - protein, 9 aa, Artificial Sequence
  Description of Artificial Sequence: Synthetic peptide
FLGAAGSTM

SEQ ID NO: 19297 - protein, 10 aa, Artificial Sequence
  Description of Artificial Sequence: Synthetic peptide
MVMENVTESF

SEQ ID NO: 19298 - protein, 11 aa, Artificial Sequence
  Description of Artificial Sequence: Synthetic peptide
TQIDPDLADQL

SEQ ID NO: 19299 - protein, 9 aa, Artificial Sequence
  Description of Artificial Sequence: Synthetic peptide
TVLDVGDAY

SEQ ID NO: 19300 - protein, 9 aa, Artificial Sequence
  Description of Artificial Sequence: Synthetic peptide
AALDLSHFL

SEQ ID NO: 19301 - protein, 9 aa, Artificial Sequence
  Description of Artificial Sequence: Synthetic peptide
IVTDSQYAL

SEQ ID NO: 19302 - protein, 9 aa, Artificial Sequence
  Description of Artificial Sequence: Synthetic peptide
ISVEPPAVL

SEQ ID NO: 19303 - protein, 9 aa, Artificial Sequence
  Description of Artificial Sequence: Synthetic peptide
AAEGQGTSL

SEQ ID NO: 19304 - protein, 9 aa, Artificial Sequence
  Description of Artificial Sequence: Synthetic peptide
HCNISGTQW

SEQ ID NO: 19305 - protein, 10 aa, Artificial Sequence
  Description of Artificial Sequence: Synthetic peptide
YVDNGTNVTL

SEQ ID NO: 19306 - protein, 9 aa, Artificial Sequence
  Description of Artificial Sequence: Synthetic peptide
ATDIPTKEL

SEQ ID NO: 19307 - protein, 9 aa, Artificial Sequence
  Description of Artificial Sequence: Synthetic peptide
AAEGQGTSL

SEQ ID NO: 19308 - protein, 10 aa, Artificial Sequence
  Description of Artificial Sequence: Synthetic peptide
AGDEGKGTSL

SEQ ID NO: 19309 - protein, 9 aa, Artificial Sequence
  Description of Artificial Sequence: Synthetic peptide
TADGCQQIL

SEQ ID NO: 19310 - protein, 8 aa, Artificial Sequence
  Description of Artificial Sequence: Synthetic peptide
VQDTSEAL

SEQ ID NO: 19311 - protein, 9 aa, Artificial Sequence
  Description of Artificial Sequence: Synthetic peptide
ATDIQTKEL

SEQ ID NO: 19312 - protein, 9 aa, Artificial Sequence
  Description of Artificial Sequence: Synthetic peptide
GAEGQGTSL

SEQ ID NO: 19313 - protein, 9 aa, Artificial Sequence
  Description of Artificial Sequence: Synthetic peptide
VLDVGGAYF

SEQ ID NO: 19314 - protein, 8 aa, Artificial Sequence
  Description of Artificial Sequence: Synthetic peptide
ALDLSHFL

SEQ ID NO: 19315 - protein, 9 aa, Artificial Sequence
  Description of Artificial Sequence: Synthetic peptide
GTDNSTITL

SEQ ID NO: 19316 - protein, 8 aa, Artificial Sequence
  Description of Artificial Sequence: Synthetic peptide
WADIHQEF

SEQ ID NO: 19317 - protein, 9 aa, Artificial Sequence
  Description of Artificial Sequence: Synthetic peptide
TQDFWEVQL

SEQ ID NO: 19318 - protein, 8 aa, Artificial Sequence
  Description of Artificial Sequence: Synthetic peptide
HTDNGTNF

SEQ ID NO: 19319 - protein, 9 aa, Artificial Sequence
  Description of Artificial Sequence: Synthetic peptide
ISDNTKNII

SEQ ID NO: 19320 - protein, 8 aa, Artificial Sequence
  Description of Artificial Sequence: Synthetic peptide
YVDNGTNV

SEQ ID NO: 19321 - protein, 8 aa, Artificial Sequence
  Description of Artificial Sequence: Synthetic peptide
YTDEIYRL

SEQ ID NO: 19322 - protein, 8 aa, Artificial Sequence
  Description of Artificial Sequence: Synthetic peptide
GQVILVAV

SEQ ID NO: 19323 - protein, 8 aa, Artificial Sequence
  Description of Artificial Sequence: Synthetic peptide
GKQKIVSL

SEQ ID NO: 19324 - protein, 10 aa, Artificial Sequence
  Description of Artificial Sequence: Synthetic peptide
SLFGSDPLSQ

SEQ ID NO: 19325 - protein, 11 aa, Artificial Sequence
  Description of Artificial Sequence: Synthetic peptide
KAYEPEKHNVW

SEQ ID NO: 19326 - protein, 10 aa, Artificial Sequence
  Description of Artificial Sequence: Synthetic peptide
VSFDPIPIHY

SEQ ID NO: 19327 - protein, 9 aa, Artificial Sequence
  Description of Artificial Sequence: Synthetic peptide
NTKNIIVQF

SEQ ID NO: 19328 - protein, 10 aa, Artificial Sequence
  Description of Artificial Sequence: Synthetic peptide
VTFEPIPIHY

SEQ ID NO: 19329 - protein, 10 aa, Artificial Sequence
  Description of Artificial Sequence: Synthetic peptide
VSFEPIPIHY

SEQ ID NO: 19330 - protein, 9 aa, Artificial Sequence
  Description of Artificial Sequence: Synthetic peptide
KQNPEVIIY

SEQ ID NO: 19331 - protein, 9 aa, Artificial Sequence
  Description of Artificial Sequence: Synthetic peptide
GAASITLTV

SEQ ID NO: 19332 - protein, 9 aa, Artificial Sequence
  Description of Artificial Sequence: Synthetic peptide
NTKNIIVQL

SEQ ID NO: 19333 - protein, 9 aa, Artificial Sequence
  Description of Artificial Sequence: Synthetic peptide
YFVNRTLIF

SEQ ID NO: 19334 - protein, 8 aa, Artificial Sequence
  Description of Artificial Sequence: Synthetic peptide
LYNVVNQL

SEQ ID NO: 19335 - protein, 9 aa, Artificial Sequence
  Description of Artificial Sequence: Synthetic peptide
IYQEPFKNL

SEQ ID NO: 19336 - protein, 8 aa, Artificial Sequence
  Description of Artificial Sequence: Synthetic peptide
SFNVTTVL

SEQ ID NO: 19337 - protein, 8 aa, Artificial Sequence
  Description of Artificial Sequence: Synthetic peptide
HFGPGQAF

SEQ ID NO: 19338 - protein, 10 aa, Artificial Sequence
  Description of Artificial Sequence: Synthetic peptide
AFQQGKAREF

SEQ ID NO: 19339 - protein, 9 aa, Artificial Sequence
  Description of Artificial Sequence: Synthetic peptide
AYYDPSKEL

SEQ ID NO: 19340 - protein, 9 aa, Artificial Sequence
  Description of Artificial Sequence: Synthetic peptide
TYQIYQEPF

SEQ ID NO: 19341 - protein, 8 aa, Artificial Sequence
  Description of Artificial Sequence: Synthetic peptide
VYNTQGYF

SEQ ID NO: 19342 - protein, 10 aa, Artificial Sequence
  Description of Artificial Sequence: Synthetic peptide
GFLGAAGSTM

SEQ ID NO: 19343 - protein, 9 aa, Artificial Sequence
  Description of Artificial Sequence: Synthetic peptide
RYHNNWRAM

SEQ ID NO: 19344 - protein, 10 aa, Artificial Sequence
  Description of Artificial Sequence: Synthetic peptide
SYFDNKTIIL

SEQ ID NO: 19345 - protein, 8 aa, Artificial Sequence
  Description of Artificial Sequence: Synthetic peptide
SFGFGEEM

SEQ ID NO: 19346 - protein, 8 aa, Artificial Sequence
  Description of Artificial Sequence: Synthetic peptide
FYVTGEVI

SEQ ID NO: 19347 - protein, 9 aa, Artificial Sequence
  Description of Artificial Sequence: Synthetic peptide
KYHSNWRAM

SEQ ID NO: 19348 - protein, 9 aa, Artificial Sequence
  Description of Artificial Sequence: Synthetic peptide
LYNTIAVLY

SEQ ID NO: 19349 - protein, 8 aa, Artificial Sequence
  Description of Artificial Sequence: Synthetic peptide
LYNVVNQL

SEQ ID NO: 19350 - protein, 9 aa, Artificial Sequence
  Description of Artificial Sequence: Synthetic peptide
IYQEPFKNL

SEQ ID NO: 19351 - protein, 10 aa, Artificial Sequence
  Description of Artificial Sequence: Synthetic peptide
GFLGAAGSTM

SEQ ID NO: 19352 - protein, 8 aa, Artificial Sequence
  Description of Artificial Sequence: Synthetic peptide
SFNVTTVL

SEQ ID NO: 19353 - protein, 8 aa, Artificial Sequence
  Description of Artificial Sequence: Synthetic peptide
HFGPGQAF

SEQ ID NO: 19354 - protein, 9 aa, Artificial Sequence
  Description of Artificial Sequence: Synthetic peptide
AYYDPSKEL

SEQ ID NO: 19355 - protein, 8 aa, Artificial Sequence
  Description of Artificial Sequence: Synthetic peptide
LYNTIAVL

SEQ ID NO: 19356 - protein, 9 aa, Artificial Sequence
  Description of Artificial Sequence: Synthetic peptide
TYQIYQEPF

SEQ ID NO: 19357 - protein, 8 aa, Artificial Sequence
  Description of Artificial Sequence: Synthetic peptide
FYVTGEVI

SEQ ID NO: 19358 - protein, 9 aa, Artificial Sequence
  Description of Artificial Sequence: Synthetic peptide
RYVDNGTNV

SEQ ID NO: 19359 - protein, 11 aa, Artificial Sequence
  Description of Artificial Sequence: Synthetic peptide
RYVDNGTNVTL

SEQ ID NO: 19360 - protein, 8 aa, Artificial Sequence
  Description of Artificial Sequence: Synthetic peptide
VYNTQGYF

SEQ ID NO: 19361 - protein, 8 aa, Artificial Sequence
  Description of Artificial Sequence: Synthetic peptide
SFGFGEEM

SEQ ID NO: 19362 - protein, 9 aa, Artificial Sequence
  Description of Artificial Sequence: Synthetic peptide
VSNITGLIL

SEQ ID NO: 19363 - protein, 9 aa, Artificial Sequence
  Description of Artificial Sequence: Synthetic peptide
ISNITGLIL

SEQ ID NO: 19364 - protein, 9 aa, Artificial Sequence
  Description of Artificial Sequence: Synthetic peptide
RTKPPLPSV

SEQ ID NO: 19365 - protein, 9 aa, Artificial Sequence
  Description of Artificial Sequence: Synthetic peptide
ANSPTSREL

SEQ ID NO: 19366 - protein, 9 aa, Artificial Sequence
  Description of Artificial Sequence: Synthetic peptide
GAASITLTV

SEQ ID NO: 19367 - protein, 9 aa, Artificial Sequence
  Description of Artificial Sequence: Synthetic peptide
VSSGVRKVL

SEQ ID NO: 19368 - protein, 9 aa, Artificial Sequence
  Description of Artificial Sequence: Synthetic peptide
KAILGHRVY

SEQ ID NO: 19369 - protein, 9 aa, Artificial Sequence
  Description of Artificial Sequence: Synthetic peptide
RAREQHPEF

SEQ ID NO: 19370 - protein, 9 aa, Artificial Sequence
  Description of Artificial Sequence: Synthetic peptide
VSSGIRKVL

SEQ ID NO: 19371 - protein, 9 aa, Artificial Sequence
  Description of Artificial Sequence: Synthetic peptide
ANSPTSREL

SEQ ID NO: 19372 - protein, 10 aa, Artificial Sequence
  Description of Artificial Sequence: Synthetic peptide
IATDIQTKEL

SEQ ID NO: 19373 - protein, 9 aa, Artificial Sequence
  Description of Artificial Sequence: Synthetic peptide
TNSPTSREL

SEQ ID NO: 19374 - protein, 10 aa, Artificial Sequence
  Description of Artificial Sequence: Synthetic peptide
IATDIPTKEL

SEQ ID NO: 19375 - protein, 9 aa, Artificial Sequence
  Description of Artificial Sequence: Synthetic peptide
VSSGVRKVL

SEQ ID NO: 19376 - protein, 9 aa, Artificial Sequence
  Description of Artificial Sequence: Synthetic peptide
IATQLSKYF

SEQ ID NO: 19377 - protein, 9 aa, Artificial Sequence
  Description of Artificial Sequence: Synthetic peptide
GAASITLTV

SEQ ID NO: 19378 - protein, 9 aa, Artificial Sequence
  Description of Artificial Sequence: Synthetic peptide
IRIGPGQAF

SEQ ID NO: 19379 - protein, 11 aa, Artificial Sequence
  Description of Artificial Sequence: Synthetic peptide
AEIQKQGQEQW

SEQ ID NO: 19380 - protein, 9 aa, Artificial Sequence
  Description of Artificial Sequence: Synthetic peptide
EEINLPGKW

SEQ ID NO: 19381 - protein, 11 aa, Artificial Sequence
  Description of Artificial Sequence: Synthetic peptide
AEQATQDVKNW

SEQ ID NO: 19382 - protein, 10 aa, Artificial Sequence
  Description of Artificial Sequence: Synthetic peptide
AEGQGTSLSF

SEQ ID NO: 19383 - protein, 9 aa, Artificial Sequence
  Description of Artificial Sequence: Synthetic peptide
LIVARTVEL

SEQ ID NO: 19384 - protein, 9 aa, Artificial Sequence
  Description of Artificial Sequence: Synthetic peptide
LIVIRTVEL

SEQ ID NO: 19385 - protein, 9 aa, Artificial Sequence
  Description of Artificial Sequence: Synthetic peptide
AALDLSHFL

SEQ ID NO: 19386 - protein, 9 aa, Artificial Sequence
  Description of Artificial Sequence: Synthetic peptide
LIVVRTVEL

SEQ ID NO: 19387 - protein, 9 aa, Artificial Sequence
  Description of Artificial Sequence: Synthetic peptide
SIVARTVEL

SEQ ID NO: 19388 - protein, 8 aa, Artificial Sequence
  Description of Artificial Sequence: Synthetic peptide
FALNPDLL

SEQ ID NO: 19389 - protein, 9 aa, Artificial Sequence
  Description of Artificial Sequence: Synthetic peptide
GTEEIKSLY

SEQ ID NO: 19390 - protein, 11 aa, Artificial Sequence
  Description of Artificial Sequence: Synthetic peptide
ETFRPTGGDMK

SEQ ID NO: 19391 - protein, 8 aa, Artificial Sequence
  Description of Artificial Sequence: Synthetic peptide
VLDVGDAY

SEQ ID NO: 19392 - protein, 9 aa, Artificial Sequence
  Description of Artificial Sequence: Synthetic peptide
SIDNSNSSY

SEQ ID NO: 19393 - protein, 9 aa, Artificial Sequence
  Description of Artificial Sequence: Synthetic peptide
GTQEIKSLY

SEQ ID NO: 19394 - protein, 11 aa, Artificial Sequence
  Description of Artificial Sequence: Synthetic peptide
QTGTQEIKSLY

SEQ ID NO: 19395 - protein, 10 aa, Artificial Sequence
  Description of Artificial Sequence: Synthetic peptide
VTVLDVGDAY

SEQ ID NO: 19396 - protein, 11 aa, Artificial Sequence
  Description of Artificial Sequence: Synthetic peptide
QTGTEEIKSLY

SEQ ID NO: 19397 - protein, 9 aa, Artificial Sequence
  Description of Artificial Sequence: Synthetic peptide
VLAEAMSQV

SEQ ID NO: 19398 - protein, 9 aa, Artificial Sequence
  Description of Artificial Sequence: Synthetic peptide
QLTEVVQKI

SEQ ID NO: 19399 - protein, 9 aa, Artificial Sequence
  Description of Artificial Sequence: Synthetic peptide
QLAEVVQKI

SEQ ID NO: 19400 - protein, 9 aa, Artificial Sequence
  Description of Artificial Sequence: Synthetic peptide
QMQEDIISV

SEQ ID NO: 19401 - protein, 9 aa, Artificial Sequence
  Description of Artificial Sequence: Synthetic peptide
SLYNTVATL

SEQ ID NO: 19402 - protein, 9 aa, Artificial Sequence
  Description of Artificial Sequence: Synthetic peptide
TLIPNPTGV

SEQ ID NO: 19403 - protein, 9 aa, Artificial Sequence
  Description of Artificial Sequence: Synthetic peptide
TLTPHLAEA

SEQ ID NO: 19404 - protein, 9 aa, Artificial Sequence
  Description of Artificial Sequence: Synthetic peptide
ILKEPVHGV

SEQ ID NO: 19405 - protein, 9 aa, Artificial Sequence
  Description of Artificial Sequence: Synthetic peptide
ILVQLQPAL

SEQ ID NO: 19406 - protein, 10 aa, Artificial Sequence
  Description of Artificial Sequence: Synthetic peptide
KVVEIEPLGV

SEQ ID NO: 19407 - protein, 9 aa, Artificial Sequence
  Description of Artificial Sequence: Synthetic peptide
QMHEDIISV

SEQ ID NO: 19408 - protein, 10 aa, Artificial Sequence
  Description of Artificial Sequence: Synthetic peptide
RVFGEAISQV

SEQ ID NO: 19409 - protein, 9 aa, Artificial Sequence
  Description of Artificial Sequence: Synthetic peptide
TLIPNPTEA

SEQ ID NO: 19410 - protein, 9 aa, Artificial Sequence
  Description of Artificial Sequence: Synthetic peptide
QLTEAVQKI

SEQ ID NO: 19411 - protein, 10 aa, Artificial Sequence
  Description of Artificial Sequence: Synthetic peptide
ALNPGLLESA

SEQ ID NO: 19412 - protein, 9 aa, Artificial Sequence
  Description of Artificial Sequence: Synthetic peptide
SLFNTEATL

SEQ ID NO: 19413 - protein, 9 aa, Artificial Sequence
  Description of Artificial Sequence: Synthetic peptide
GLADQLIHM

SEQ ID NO: 19414 - protein, 10 aa, Artificial Sequence
  Description of Artificial Sequence: Synthetic peptide
TLWQRPLVTV

SEQ ID NO: 19415 - protein, 9 aa, Artificial Sequence
  Description of Artificial Sequence: Synthetic peptide
QMHDDIISV

SEQ ID NO: 19416 - protein, 9 aa, Artificial Sequence
  Description of Artificial Sequence: Synthetic peptide
AIVGLIVAV

SEQ ID NO: 19417 - protein, 9 aa, Artificial Sequence
  Description of Artificial Sequence: Synthetic peptide
AVLAIVNRV

SEQ ID NO: 19418 - protein, 9 aa, Artificial Sequence
  Description of Artificial Sequence: Synthetic peptide
ALTDIVPLT

SEQ ID NO: 19419 - protein, 10 aa, Artificial Sequence
  Description of Artificial Sequence: Synthetic peptide
KLVPVDPSEV

SEQ ID NO: 19420 - protein, 9 aa, Artificial Sequence
  Description of Artificial Sequence: Synthetic peptide
IVTDSQYAL

SEQ ID NO: 19421 - protein, 9 aa, Artificial Sequence
  Description of Artificial Sequence: Synthetic peptide
VLAEAMSQV

SEQ ID NO: 19422 - protein, 9 aa, Artificial Sequence
  Description of Artificial Sequence: Synthetic peptide
TLIPNPTGV

SEQ ID NO: 19423 - protein, 9 aa, Artificial Sequence
  Description of Artificial Sequence: Synthetic peptide
ILKEPVHGV

SEQ ID NO: 19424 - protein, 9 aa, Artificial Sequence
  Description of Artificial Sequence: Synthetic peptide
AVIGNIRQA

SEQ ID NO: 19425 - protein, 9 aa, Artificial Sequence
  Description of Artificial Sequence: Synthetic peptide
QLAEVVQKI

SEQ ID NO: 19426 - protein, 10 aa, Artificial Sequence
  Description of Artificial Sequence: Synthetic peptide
RVFGEAISQV

SEQ ID NO: 19427 - protein, 9 aa, Artificial Sequence
  Description of Artificial Sequence: Synthetic peptide
TLIPNPTEA

SEQ ID NO: 19428 - protein, 9 aa, Artificial Sequence
  Description of Artificial Sequence: Synthetic peptide
SLYNTVATL

SEQ ID NO: 19429 - protein, 9 aa, Artificial Sequence
  Description of Artificial Sequence: Synthetic peptide
QLTEVVQKI

SEQ ID NO: 19430 - protein, 9 aa, Artificial Sequence
  Description of Artificial Sequence: Synthetic peptide
SISERILSA

SEQ ID NO: 19431 - protein, 9 aa, Artificial Sequence
  Description of Artificial Sequence: Synthetic peptide
IVKVEPLGV

SEQ ID NO: 19432 - protein, 10 aa, Artificial Sequence
  Description of Artificial Sequence: Synthetic peptide
ALNPGLLESA

SEQ ID NO: 19433 - protein, 10 aa, Artificial Sequence
  Description of Artificial Sequence: Synthetic peptide
TLWQRPLVTV

SEQ ID NO: 19434 - protein, 9 aa, Artificial Sequence
  Description of Artificial Sequence: Synthetic peptide
QLQARILAV

SEQ ID NO: 19435 - protein, 10 aa, Artificial Sequence
  Description of Artificial Sequence: Synthetic peptide
YLKDQQLLGI

SEQ ID NO: 19436 - protein, 10 aa, Artificial Sequence
  Description of Artificial Sequence: Synthetic peptide
KVVEIEPLGV

SEQ ID NO: 19437 - protein, 9 aa, Artificial Sequence
  Description of Artificial Sequence: Synthetic peptide
ALRDSGLEV

SEQ ID NO: 19438 - protein, 9 aa, Artificial Sequence
  Description of Artificial Sequence: Synthetic peptide
SAKELIAEV

SEQ ID NO: 19439 - protein, 9 aa, Artificial Sequence
  Description of Artificial Sequence: Synthetic peptide
AVFAIVNRV

SEQ ID NO: 19440 - protein, 9 aa, Artificial Sequence
  Description of Artificial Sequence: Synthetic peptide
TLTPHLAEA

SEQ ID NO: 19441 - protein, 8 aa, Artificial Sequence
  Description of Artificial Sequence: Synthetic peptide
VLAIVNRV

SEQ ID NO: 19442 - protein, 9 aa, Artificial Sequence
  Description of Artificial Sequence: Synthetic peptide
ASITLTVQV

SEQ ID NO: 19443 - protein, 9 aa, Artificial Sequence
  Description of Artificial Sequence: Synthetic peptide
QLQARVLAV

SEQ ID NO: 19444 - protein, 9 aa, Artificial Sequence
  Description of Artificial Sequence: Synthetic peptide
RIIYNLIEV

SEQ ID NO: 19445 - protein, 9 aa, Artificial Sequence
  Description of Artificial Sequence: Synthetic peptide
GAASITLTV

SEQ ID NO: 19446 - protein, 11 aa, Artificial Sequence
  Description of Artificial Sequence: Synthetic peptide
FLKEKGGLDGL

SEQ ID NO: 19447 - protein, 9 aa, Artificial Sequence
  Description of Artificial Sequence: Synthetic peptide
QLTEAVQKI

SEQ ID NO: 19448 - protein, 9 aa, Artificial Sequence
  Description of Artificial Sequence: Synthetic peptide
AIVGLIVAV

SEQ ID NO: 19449 - protein, 10 aa, Artificial Sequence
  Description of Artificial Sequence: Synthetic peptide
SLFGSDPSSQ

SEQ ID NO: 19450 - protein, 9 aa, Artificial Sequence
  Description of Artificial Sequence: Synthetic peptide
ALSPRTLNA

SEQ ID NO: 19451 - protein, 10 aa, Artificial Sequence
  Description of Artificial Sequence: Synthetic peptide
KLVPVDPSEV

SEQ ID NO: 19452 - protein, 9 aa, Artificial Sequence
  Description of Artificial Sequence: Synthetic peptide
AVLAIVNRV

SEQ ID NO: 19453 - protein, 9 aa, Artificial Sequence
  Description of Artificial Sequence: Synthetic peptide
ELKKIIGQV

SEQ ID NO: 19454 - protein, 9 aa, Artificial Sequence
  Description of Artificial Sequence: Synthetic peptide
MIIGGLIGL

SEQ ID NO: 19455 - protein, 9 aa, Artificial Sequence
  Description of Artificial Sequence: Synthetic peptide
RIIEIVQGI

SEQ ID NO: 19456 - protein, 9 aa, Artificial Sequence
  Description of Artificial Sequence: Synthetic peptide
GAASIALTV

SEQ ID NO: 19457 - protein, 9 aa, Artificial Sequence
  Description of Artificial Sequence: Synthetic peptide
AVKKYNSQV

SEQ ID NO: 19458 - protein, 9 aa, Artificial Sequence
  Description of Artificial Sequence: Synthetic peptide
QMHEDIISV

SEQ ID NO: 19459 - protein, 10 aa, Artificial Sequence
  Description of Artificial Sequence: Synthetic peptide
KIVKVEPLGV

SEQ ID NO: 19460 - protein, 9 aa, Artificial Sequence
  Description of Artificial Sequence: Synthetic peptide
LLNATAIAV

SEQ ID NO: 19461 - protein, 10 aa, Artificial Sequence
  Description of Artificial Sequence: Synthetic peptide
VLIGPTPVNI

SEQ ID NO: 19462 - protein, 10 aa, Artificial Sequence
  Description of Artificial Sequence: Synthetic peptide
KLVPVDPGEV

SEQ ID NO: 19463 - protein, 9 aa, Artificial Sequence
  Description of Artificial Sequence: Synthetic peptide
LLNTTAIAV

SEQ ID NO: 19464 - protein, 9 aa, Artificial Sequence
  Description of Artificial Sequence: Synthetic peptide
SLYNTVATL

SEQ ID NO: 19465 - protein, 9 aa, Artificial Sequence
  Description of Artificial Sequence: Synthetic peptide
QLTEVVQKI

SEQ ID NO: 19466 - protein, 9 aa, Artificial Sequence
  Description of Artificial Sequence: Synthetic peptide
TLIPNPTGV

SEQ ID NO: 19467 - protein, 9 aa, Artificial Sequence
  Description of Artificial Sequence: Synthetic peptide
QLAEVVQKI

SEQ ID NO: 19468 - protein, 9 aa, Artificial Sequence
  Description of Artificial Sequence: Synthetic peptide
ILKEPVHGV

SEQ ID NO: 19469 - protein, 9 aa, Artificial Sequence
  Description of Artificial Sequence: Synthetic peptide
NISNWLWYI

SEQ ID NO: 19470 - protein, 9 aa, Artificial Sequence
  Description of Artificial Sequence: Synthetic peptide
AVLAIVNRV

SEQ ID NO: 19471 - protein, 9 aa, Artificial Sequence
  Description of Artificial Sequence: Synthetic peptide
GLDQWTYQI

SEQ ID NO: 19472 - protein, 10 aa, Artificial Sequence
  Description of Artificial Sequence: Synthetic peptide
TLWQRPLVTV

SEQ ID NO: 19473 - protein, 9 aa, Artificial Sequence
  Description of Artificial Sequence: Synthetic peptide
KISNWLWYI

SEQ ID NO: 19474 - protein, 9 aa, Artificial Sequence
  Description of Artificial Sequence: Synthetic peptide
RIIYNLIEV

SEQ ID NO: 19475 - protein, 9 aa, Artificial Sequence
  Description of Artificial Sequence: Synthetic peptide
ILVQLQPAL

SEQ ID NO: 19476 - protein, 9 aa, Artificial Sequence
  Description of Artificial Sequence: Synthetic peptide
GLADQLIHM

SEQ ID NO: 19477 - protein, 9 aa, Artificial Sequence
  Description of Artificial Sequence: Synthetic peptide
TLNAWVKVI

SEQ ID NO: 19478 - protein, 9 aa, Artificial Sequence
  Description of Artificial Sequence: Synthetic peptide
AIVGLIVAV

SEQ ID NO: 19479 - protein, 10 aa, Artificial Sequence
  Description of Artificial Sequence: Synthetic peptide
TLWQRPLVTI

SEQ ID NO: 19480 - protein, 9 aa, Artificial Sequence
  Description of Artificial Sequence: Synthetic peptide
SLFNTEATL

SEQ ID NO: 19481 - protein, 10 aa, Artificial Sequence
  Description of Artificial Sequence: Synthetic peptide
KVVEIEPLGV

SEQ ID NO: 19482 - protein, 9 aa, Artificial Sequence
  Description of Artificial Sequence: Synthetic peptide
DISKWLWYI

SEQ ID NO: 19483 - protein, 9 aa, Artificial Sequence
  Description of Artificial Sequence: Synthetic peptide
MIIGGLIGL

SEQ ID NO: 19484 - protein, 9 aa, Artificial Sequence
  Description of Artificial Sequence: Synthetic peptide
TLTVQVRQL

SEQ ID NO: 19485 - protein, 9 aa, Artificial Sequence
  Description of Artificial Sequence: Synthetic peptide
FQLPPIERL

SEQ ID NO: 19486 - protein, 9 aa, Artificial Sequence
  Description of Artificial Sequence: Synthetic peptide
AVFAIVNRV

SEQ ID NO: 19487 - protein, 9 aa, Artificial Sequence
  Description of Artificial Sequence: Synthetic peptide
HLEGKIILV

SEQ ID NO: 19488 - protein, 9 aa, Artificial Sequence
  Description of Artificial Sequence: Synthetic peptide
QLQARILAV

SEQ ID NO: 19489 - protein, 9 aa, Artificial Sequence
  Description of Artificial Sequence: Synthetic peptide
ALTDIVPLT

SEQ ID NO: 19490 - protein, 9 aa, Artificial Sequence
  Description of Artificial Sequence: Synthetic peptide
RIIEIVQGI

SEQ ID NO: 19491 - protein, 9 aa, Artificial Sequence
  Description of Artificial Sequence: Synthetic peptide
LLNATAIAV

SEQ ID NO: 19492 - protein, 9 aa, Artificial Sequence
  Description of Artificial Sequence: Synthetic peptide
LLNTTAIAV

SEQ ID NO: 19493 - protein, 9 aa, Artificial Sequence
  Description of Artificial Sequence: Synthetic peptide
VLAEAMSQV

SEQ ID NO: 19494 - protein, 9 aa, Artificial Sequence
  Description of Artificial Sequence: Synthetic peptide
VIWGKIPKF

SEQ ID NO: 19495 - protein, 10 aa, Artificial Sequence
  Description of Artificial Sequence: Synthetic peptide
ALAWDDLRNL

SEQ ID NO: 19496 - protein, 10 aa, Artificial Sequence
  Description of Artificial Sequence: Synthetic peptide
RVFGEAISQV

SEQ ID NO: 19497 - protein, 9 aa, Artificial Sequence
  Description of Artificial Sequence: Synthetic peptide
IVTDSQYAL

SEQ ID NO: 19498 - protein, 9 aa, Artificial Sequence
  Description of Artificial Sequence: Synthetic peptide
HLEGKVILV

SEQ ID NO: 19499 - protein, 10 aa, Artificial Sequence
  Description of Artificial Sequence: Synthetic peptide
NLAWYWGQEL

SEQ ID NO: 19500 - protein, 9 aa, Artificial Sequence
  Description of Artificial Sequence: Synthetic peptide
LVNQIIEEL

SEQ ID NO: 19501 - protein, 10 aa, Artificial Sequence
  Description of Artificial Sequence: Synthetic peptide
VLIGPTPVNI

SEQ ID NO: 19502 - protein, 9 aa, Artificial Sequence
  Description of Artificial Sequence: Synthetic peptide
AIVAFIVAI

SEQ ID NO: 19503 - protein, 10 aa, Artificial Sequence
  Description of Artificial Sequence: Synthetic peptide
ALAWEDLRNL

SEQ ID NO: 19504 - protein, 10 aa, Artificial Sequence
  Description of Artificial Sequence: Synthetic peptide
ALNPGLLESA

SEQ ID NO: 19505 - protein, 9 aa, Artificial Sequence
  Description of Artificial Sequence: Synthetic peptide
ILINCNTSV

SEQ ID NO: 19506 - protein, 9 aa, Artificial Sequence
  Description of Artificial Sequence: Synthetic peptide
IIAVIVWTI

SEQ ID NO: 19507 - protein, 9 aa, Artificial Sequence
  Description of Artificial Sequence: Synthetic peptide
TLQEQIAWM

SEQ ID NO: 19508 - protein, 9 aa, Artificial Sequence
  Description of Artificial Sequence: Synthetic peptide
AIIRILQQL

SEQ ID NO: 19509 - protein, 9 aa, Artificial Sequence
  Description of Artificial Sequence: Synthetic peptide
ILVQIQPDL

SEQ ID NO: 19510 - protein, 11 aa, Artificial Sequence
  Description of Artificial Sequence: Synthetic peptide
VQLGIPHPAGL

SEQ ID NO: 19511 - protein, 10 aa, Artificial Sequence
  Description of Artificial Sequence: Synthetic peptide
RTQDFWEVQL

SEQ ID NO: 19512 - protein, 9 aa, Artificial Sequence
  Description of Artificial Sequence: Synthetic peptide
KALTDIVAL

SEQ ID NO: 19513 - protein, 9 aa, Artificial Sequence
  Description of Artificial Sequence: Synthetic peptide
EILKYLVNL

SEQ ID NO: 19514 - protein, 9 aa, Artificial Sequence
  Description of Artificial Sequence: Synthetic peptide
RLRDFILIV

SEQ ID NO: 19515 - protein, 9 aa, Artificial Sequence
  Description of Artificial Sequence: Synthetic peptide
ILVQFNETV

SEQ ID NO: 19516 - protein, 11 aa, Artificial Sequence
  Description of Artificial Sequence: Synthetic peptide
QLAEVVQKIAL

SEQ ID NO: 19517 - protein, 9 aa, Artificial Sequence
  Description of Artificial Sequence: Synthetic peptide
ALTDIVALT

SEQ ID NO: 19518 - protein, 9 aa, Artificial Sequence
  Description of Artificial Sequence: Synthetic peptide
QMHDDIISV

SEQ ID NO: 19519 - protein, 9 aa, Artificial Sequence
  Description of Artificial Sequence: Synthetic peptide
AVIGNIRQA

SEQ ID NO: 19520 - protein, 9 aa, Artificial Sequence
  Description of Artificial Sequence: Synthetic peptide
QLAEVVQKI

SEQ ID NO: 19521 - protein, 9 aa, Artificial Sequence
  Description of Artificial Sequence: Synthetic peptide
AVFAIVNRV

SEQ ID NO: 19522 - protein, 10 aa, Artificial Sequence
  Description of Artificial Sequence: Synthetic peptide
RVFGEAISQV

SEQ ID NO: 19523 - protein, 9 aa, Artificial Sequence
  Description of Artificial Sequence: Synthetic peptide
IVARTVETL

SEQ ID NO: 19524 - protein, 9 aa, Artificial Sequence
  Description of Artificial Sequence: Synthetic peptide
QLTEVVQKI

SEQ ID NO: 19525 - protein, 9 aa, Artificial Sequence
  Description of Artificial Sequence: Synthetic peptide
VLAEAMSQV

SEQ ID NO: 19526 - protein, 9 aa, Artificial Sequence
  Description of Artificial Sequence: Synthetic peptide
IEIKDTMEA

SEQ ID NO: 19527 - protein, 9 aa, Artificial Sequence
  Description of Artificial Sequence: Synthetic peptide
STVTINETV

SEQ ID NO: 19528 - protein, 9 aa, Artificial Sequence
  Description of Artificial Sequence: Synthetic peptide
AVAEGTDRI

SEQ ID NO: 19529 - protein, 9 aa, Artificial Sequence
  Description of Artificial Sequence: Synthetic peptide
KAIEAQQHL

SEQ ID NO: 19530 - protein, 9 aa, Artificial Sequence
  Description of Artificial Sequence: Synthetic peptide
SQVTNTNIM

SEQ ID NO: 19531 - protein, 9 aa, Artificial Sequence
  Description of Artificial Sequence: Synthetic peptide
SAKELIAEV

SEQ ID NO: 19532 - protein, 11 aa, Artificial Sequence
  Description of Artificial Sequence: Synthetic peptide
TQVDPGLADQL

SEQ ID NO: 19533 - protein, 9 aa, Artificial Sequence
  Description of Artificial Sequence: Synthetic peptide
ASIALTVQA

SEQ ID NO: 19534 - protein, 11 aa, Artificial Sequence
  Description of Artificial Sequence: Synthetic peptide
VVIQDNSDIKV

SEQ ID NO: 19535 - protein, 9 aa, Artificial Sequence
  Description of Artificial Sequence: Synthetic peptide
VTINETVTL

SEQ ID NO: 19536 - protein, 9 aa, Artificial Sequence
  Description of Artificial Sequence: Synthetic peptide
GESGVLLGA

SEQ ID NO: 19537 - protein, 9 aa, Artificial Sequence
  Description of Artificial Sequence: Synthetic peptide
SISERILSA

SEQ ID NO: 19538 - protein, 9 aa, Artificial Sequence
  Description of Artificial Sequence: Synthetic peptide
VQFNETVNI

SEQ ID NO: 19539 - protein, 9 aa, Artificial Sequence
  Description of Artificial Sequence: Synthetic peptide
AIVGLIVAV

SEQ ID NO: 19540 - protein, 9 aa, Artificial Sequence
  Description of Artificial Sequence: Synthetic peptide
AVLAIVNRV

SEQ ID NO: 19541 - protein, 9 aa, Artificial Sequence
  Description of Artificial Sequence: Synthetic peptide
WTVNDIQKL

SEQ ID NO: 19542 - protein, 9 aa, Artificial Sequence
  Description of Artificial Sequence: Synthetic peptide
RIIEIVQGI

SEQ ID NO: 19543 - protein, 9 aa, Artificial Sequence
  Description of Artificial Sequence: Synthetic peptide
ATLEEMMTA

SEQ ID NO: 19544 - protein, 9 aa, Artificial Sequence
  Description of Artificial Sequence: Synthetic peptide
GAASITLTV

SEQ ID NO: 19545 - protein, 9 aa, Artificial Sequence
  Description of Artificial Sequence: Synthetic peptide
IVTDSQYAL

SEQ ID NO: 19546 - protein, 9 aa, Artificial Sequence
  Description of Artificial Sequence: Synthetic peptide
LEKEPIMGA

SEQ ID NO: 19547 - protein, 9 aa, Artificial Sequence
  Description of Artificial Sequence: Synthetic peptide
MIIGGLIGL

SEQ ID NO: 19548 - protein, 10 aa, Artificial Sequence
  Description of Artificial Sequence: Synthetic peptide
KVVEIEPLGV

SEQ ID NO: 19549 - protein, 9 aa, Artificial Sequence
  Description of Artificial Sequence: Synthetic peptide
FTSGAVKAA

SEQ ID NO: 19550 - protein, 9 aa, Artificial Sequence
  Description of Artificial Sequence: Synthetic peptide
VVIQDNSEI

SEQ ID NO: 19551 - protein, 10 aa, Artificial Sequence
  Description of Artificial Sequence: Synthetic peptide
NQIDSISERI

SEQ ID NO: 19552 - protein, 9 aa, Artificial Sequence
  Description of Artificial Sequence: Synthetic peptide
KEVESKAEP

SEQ ID NO: 19553 - protein, 9 aa, Artificial Sequence
  Description of Artificial Sequence: Synthetic peptide
GAASIALTV

SEQ ID NO: 19554 - protein, 10 aa, Artificial Sequence
  Description of Artificial Sequence: Synthetic peptide
SQYALGIIQA

SEQ ID NO: 19555 - protein, 10 aa, Artificial Sequence
  Description of Artificial Sequence: Synthetic peptide
VQIQPDLTGA

SEQ ID NO: 19556 - protein, 9 aa, Artificial Sequence
  Description of Artificial Sequence: Synthetic peptide
TLTPHLAEA

SEQ ID NO: 19557 - protein, 9 aa, Artificial Sequence
  Description of Artificial Sequence: Synthetic peptide
FQQGEAREL

SEQ ID NO: 19558 - protein, 9 aa, Artificial Sequence
  Description of Artificial Sequence: Synthetic peptide
QLTEAVQKI

SEQ ID NO: 19559 - protein, 11 aa, Artificial Sequence
  Description of Artificial Sequence: Synthetic peptide
VVIQDNSEIKV

SEQ ID NO: 19560 - protein, 9 aa, Artificial Sequence
  Description of Artificial Sequence: Synthetic peptide
IIYTLIEEA

SEQ ID NO: 19561 - protein, 9 aa, Artificial Sequence
  Description of Artificial Sequence: Synthetic peptide
ASITLTVQV

SEQ ID NO: 19562 - protein, 9 aa, Artificial Sequence
  Description of Artificial Sequence: Synthetic peptide
SQIYPGIKV

SEQ ID NO: 19563 - protein, 9 aa, Artificial Sequence
  Description of Artificial Sequence: Synthetic peptide
TTSNLQEQI

SEQ ID NO: 19564 - protein, 9 aa, Artificial Sequence
  Description of Artificial Sequence: Synthetic peptide
SLYNTVATL

SEQ ID NO: 19565 - protein, 9 aa, Artificial Sequence
  Description of Artificial Sequence: Synthetic peptide
FTSAAVKAA

SEQ ID NO: 19566 - protein, 9 aa, Artificial Sequence
  Description of Artificial Sequence: Synthetic peptide
NAKTIIVQL

SEQ ID NO: 19567 - protein, 9 aa, Artificial Sequence
  Description of Artificial Sequence: Synthetic peptide
ILKEPVHGV

SEQ ID NO: 19568 - protein, 11 aa, Artificial Sequence
  Description of Artificial Sequence: Synthetic peptide
EVIPAETGQEA

SEQ ID NO: 19569 - protein, 9 aa, Artificial Sequence
  Description of Artificial Sequence: Synthetic peptide
LVNQIIEEL

SEQ ID NO: 19570 - protein, 9 aa, Artificial Sequence
  Description of Artificial Sequence: Synthetic peptide
NAKNIIVQL

SEQ ID NO: 19571 - protein, 9 aa, Artificial Sequence
  Description of Artificial Sequence: Synthetic peptide
QLTEVVQKI

SEQ ID NO: 19572 - protein, 9 aa, Artificial Sequence
  Description of Artificial Sequence: Synthetic peptide
AVIGNIRQA

SEQ ID NO: 19573 - protein, 9 aa, Artificial Sequence
  Description of Artificial Sequence: Synthetic peptide
IVTDSQYAL

SEQ ID NO: 19574 - protein, 10 aa, Artificial Sequence
  Description of Artificial Sequence: Synthetic peptide
KVVEIEPLGV

SEQ ID NO: 19575 - protein, 9 aa, Artificial Sequence
  Description of Artificial Sequence: Synthetic peptide
IQDNSDIKV

SEQ ID NO: 19576 - protein, 11 aa, Artificial Sequence
  Description of Artificial Sequence: Synthetic peptide
VVIQDNSDIKV

SEQ ID NO: 19577 - protein, 9 aa, Artificial Sequence
  Description of Artificial Sequence: Synthetic peptide
IQDNSEIKV

SEQ ID NO: 19578 - protein, 9 aa, Artificial Sequence
  Description of Artificial Sequence: Synthetic peptide
AIVGLIVAV

SEQ ID NO: 19579 - protein, 9 aa, Artificial Sequence
  Description of Artificial Sequence: Synthetic peptide
QLAEVVQKI

SEQ ID NO: 19580 - protein, 9 aa, Artificial Sequence
  Description of Artificial Sequence: Synthetic peptide
AVLAIVNRV

SEQ ID NO: 19581 - protein, 9 aa, Artificial Sequence
  Description of Artificial Sequence: Synthetic peptide
TVSSNFPQI

SEQ ID NO: 19582 - protein, 10 aa, Artificial Sequence
  Description of Artificial Sequence: Synthetic peptide
RVFGEAISQV

SEQ ID NO: 19583 - protein, 9 aa, Artificial Sequence
  Description of Artificial Sequence: Synthetic peptide
VLAEAMSQV

SEQ ID NO: 19584 - protein, 9 aa, Artificial Sequence
  Description of Artificial Sequence: Synthetic peptide
RIIEIVQGI

SEQ ID NO: 19585 - protein, 11 aa, Artificial Sequence
  Description of Artificial Sequence: Synthetic peptide
TQVDPGLADQL

SEQ ID NO: 19586 - protein, 11 aa, Artificial Sequence
  Description of Artificial Sequence: Synthetic peptide
VVIQDNSEIKV

SEQ ID NO: 19587 - protein, 9 aa, Artificial Sequence
  Description of Artificial Sequence: Synthetic peptide
GGIGGFIKV

SEQ ID NO: 19588 - protein, 9 aa, Artificial Sequence
  Description of Artificial Sequence: Synthetic peptide
SQIYPGIKV

SEQ ID NO: 19589 - protein, 9 aa, Artificial Sequence
  Description of Artificial Sequence: Synthetic peptide
KAIEAQQHL

SEQ ID NO: 19590 - protein, 10 aa, Artificial Sequence
  Description of Artificial Sequence: Synthetic peptide
TVLDVGDAYF

SEQ ID NO: 19591 - protein, 9 aa, Artificial Sequence
  Description of Artificial Sequence: Synthetic peptide
KALTDIVAL

SEQ ID NO: 19592 - protein, 9 aa, Artificial Sequence
  Description of Artificial Sequence: Synthetic peptide
MIIGGLIGL

SEQ ID NO: 19593 - protein, 9 aa, Artificial Sequence
  Description of Artificial Sequence: Synthetic peptide
VVIQDNSEI

SEQ ID NO: 19594 - protein, 9 aa, Artificial Sequence
  Description of Artificial Sequence: Synthetic peptide
TLTPHLAEA

SEQ ID NO: 19595 - protein, 9 aa, Artificial Sequence
  Description of Artificial Sequence: Synthetic peptide
AVFAIVNRV

SEQ ID NO: 19596 - protein, 9 aa, Artificial Sequence
  Description of Artificial Sequence: Synthetic peptide
ASITLTVQV

SEQ ID NO: 19597 - protein, 9 aa, Artificial Sequence
  Description of Artificial Sequence: Synthetic peptide
GAASITLTV

SEQ ID NO: 19598 - protein, 9 aa, Artificial Sequence
  Description of Artificial Sequence: Synthetic peptide
VQFNETVNI

SEQ ID NO: 19599 - protein, 9 aa, Artificial Sequence
  Description of Artificial Sequence: Synthetic peptide
QLTEAVQKI

SEQ ID NO: 19600 - protein, 9 aa, Artificial Sequence
  Description of Artificial Sequence: Synthetic peptide
AIVAFIVAI

SEQ ID NO: 19601 - protein, 9 aa, Artificial Sequence
  Description of Artificial Sequence: Synthetic peptide
VTINETVTL

SEQ ID NO: 19602 - protein, 9 aa, Artificial Sequence
  Description of Artificial Sequence: Synthetic peptide
GAASIALTV

SEQ ID NO: 19603 - protein, 9 aa, Artificial Sequence
  Description of Artificial Sequence: Synthetic peptide
STVTINETV

SEQ ID NO: 19604 - protein, 9 aa, Artificial Sequence
  Description of Artificial Sequence: Synthetic peptide
AVAEGTDRI

SEQ ID NO: 19605 - protein, 9 aa, Artificial Sequence
  Description of Artificial Sequence: Synthetic peptide
YVDRFFKTL

SEQ ID NO: 19606 - protein, 9 aa, Artificial Sequence
  Description of Artificial Sequence: Synthetic peptide
YVDRFFKAL

SEQ ID NO: 19607 - protein, 9 aa, Artificial Sequence
  Description of Artificial Sequence: Synthetic peptide
AVLAIVNRV

SEQ ID NO: 19608 - protein, 9 aa, Artificial Sequence
  Description of Artificial Sequence: Synthetic peptide
QLAEVVQKI

SEQ ID NO: 19609 - protein, 9 aa, Artificial Sequence
  Description of Artificial Sequence: Synthetic peptide
AVFAIVNRV

SEQ ID NO: 19610 - protein, 9 aa, Artificial Sequence
  Description of Artificial Sequence: Synthetic peptide
QLTEVVQKI

SEQ ID NO: 19611 - protein, 10 aa, Artificial Sequence
  Description of Artificial Sequence: Synthetic peptide
TLWQRPLVTV

SEQ ID NO: 19612 - protein, 9 aa, Artificial Sequence
  Description of Artificial Sequence: Synthetic peptide
GLDQWTYQI

SEQ ID NO: 19613 - protein, 9 aa, Artificial Sequence
  Description of Artificial Sequence: Synthetic peptide
ILKEPVHGV

SEQ ID NO: 19614 - protein, 9 aa, Artificial Sequence
  Description of Artificial Sequence: Synthetic peptide
FSPEVIPMF

SEQ ID NO: 19615 - protein, 9 aa, Artificial Sequence
  Description of Artificial Sequence: Synthetic peptide
VLAEAMSQV

SEQ ID NO: 19616 - protein, 9 aa, Artificial Sequence
  Description of Artificial Sequence: Synthetic peptide
HLEGKIILV

SEQ ID NO: 19617 - protein, 10 aa, Artificial Sequence
  Description of Artificial Sequence: Synthetic peptide
KVVEIEPLGV

SEQ ID NO: 19618 - protein, 9 aa, Artificial Sequence
  Description of Artificial Sequence: Synthetic peptide
HLEGKVILV

SEQ ID NO: 19619 - protein, 10 aa, Artificial Sequence
  Description of Artificial Sequence: Synthetic peptide
RVFGEAISQV

SEQ ID NO: 19620 - protein, 9 aa, Artificial Sequence
  Description of Artificial Sequence: Synthetic peptide
IVARTVETL

SEQ ID NO: 19621 - protein, 9 aa, Artificial Sequence
  Description of Artificial Sequence: Synthetic peptide
AVIGNIRQA

SEQ ID NO: 19622 - protein, 10 aa, Artificial Sequence
  Description of Artificial Sequence: Synthetic peptide
KVVEIEPLGV

SEQ ID NO: 19623 - protein, 9 aa, Artificial Sequence
  Description of Artificial Sequence: Synthetic peptide
RIIEIVQGI

SEQ ID NO: 19624 - protein, 9 aa, Artificial Sequence
  Description of Artificial Sequence: Synthetic peptide
AVFAIVNRV

SEQ ID NO: 19625 - protein, 9 aa, Artificial Sequence
  Description of Artificial Sequence: Synthetic peptide
AIVGLIVAV

SEQ ID NO: 19626 - protein, 9 aa, Artificial Sequence
  Description of Artificial Sequence: Synthetic peptide
KAIEAQQHL

SEQ ID NO: 19627 - protein, 9 aa, Artificial Sequence
  Description of Artificial Sequence: Synthetic peptide
WTVNDIQKL

SEQ ID NO: 19628 - protein, 9 aa, Artificial Sequence
  Description of Artificial Sequence: Synthetic peptide
GESGVLLGA

SEQ ID NO: 19629 - protein, 9 aa, Artificial Sequence
  Description of Artificial Sequence: Synthetic peptide
IEIKDTMEA

SEQ ID NO: 19630 - protein, 9 aa, Artificial Sequence
  Description of Artificial Sequence: Synthetic peptide
QLTEVVQKI

SEQ ID NO: 19631 - protein, 9 aa, Artificial Sequence
  Description of Artificial Sequence: Synthetic peptide
AIIRILQQL

SEQ ID NO: 19632 - protein, 9 aa, Artificial Sequence
  Description of Artificial Sequence: Synthetic peptide
QLAEVVQKI

SEQ ID NO: 19633 - protein, 9 aa, Artificial Sequence
  Description of Artificial Sequence: Synthetic peptide
LEKEPIMGA

SEQ ID NO: 19634 - protein, 9 aa, Artificial Sequence
  Description of Artificial Sequence: Synthetic peptide
MIIGGLIGL

SEQ ID NO: 19635 - protein, 9 aa, Artificial Sequence
  Description of Artificial Sequence: Synthetic peptide
VLAEAMSQV

SEQ ID NO: 19636 - protein, 9 aa, Artificial Sequence
  Description of Artificial Sequence: Synthetic peptide
TLIPNPTGV

SEQ ID NO: 19637 - protein, 9 aa, Artificial Sequence
  Description of Artificial Sequence: Synthetic peptide
FTSGAVKAA

SEQ ID NO: 19638 - protein, 10 aa, Artificial Sequence
  Description of Artificial Sequence: Synthetic peptide
RVLAEAMSQV

SEQ ID NO: 19639 - protein, 11 aa, Artificial Sequence
  Description of Artificial Sequence: Synthetic peptide
VVIQDNSDIKV

SEQ ID NO: 19640 - protein, 9 aa, Artificial Sequence
  Description of Artificial Sequence: Synthetic peptide
STVTINETV

SEQ ID NO: 19641 - protein, 9 aa, Artificial Sequence
  Description of Artificial Sequence: Synthetic peptide
KVVTLTDTT

SEQ ID NO: 19642 - protein, 9 aa, Artificial Sequence
  Description of Artificial Sequence: Synthetic peptide
GTAGSTMGA

SEQ ID NO: 19643 - protein, 9 aa, Artificial Sequence
  Description of Artificial Sequence: Synthetic peptide
VEIEPLGVA

SEQ ID NO: 19644 - protein, 9 aa, Artificial Sequence
  Description of Artificial Sequence: Synthetic peptide
KEVESKAEP

SEQ ID NO: 19645 - protein, 9 aa, Artificial Sequence
  Description of Artificial Sequence: Synthetic peptide
ILKEPVHGV

SEQ ID NO: 19646 - protein, 9 aa, Artificial Sequence
  Description of Artificial Sequence: Synthetic peptide
IIYTLIEEA

SEQ ID NO: 19647 - protein, 10 aa, Artificial Sequence
  Description of Artificial Sequence: Synthetic peptide
KAIEAQQHLL

SEQ ID NO: 19648 - protein, 9 aa, Artificial Sequence
  Description of Artificial Sequence: Synthetic peptide
AVLAIVNRV

SEQ ID NO: 19649 - protein, 10 aa, Artificial Sequence
  Description of Artificial Sequence: Synthetic peptide
KSYSTESHNV

SEQ ID NO: 19650 - protein, 9 aa, Artificial Sequence
  Description of Artificial Sequence: Synthetic peptide
QIYPGIKVK

SEQ ID NO: 19651 - protein, 10 aa, Artificial Sequence
  Description of Artificial Sequence: Synthetic peptide
IVQQQSNLLK

SEQ ID NO: 19652 - protein, 9 aa, Artificial Sequence
  Description of Artificial Sequence: Synthetic peptide
RVLGTVAAK

SEQ ID NO: 19653 - protein, 9 aa, Artificial Sequence
  Description of Artificial Sequence: Synthetic peptide
RTNSPTSRK

SEQ ID NO: 19654 - protein, 9 aa, Artificial Sequence
  Description of Artificial Sequence: Synthetic peptide
SVIKQACPK

SEQ ID NO: 19655 - protein, 10 aa, Artificial Sequence
  Description of Artificial Sequence: Synthetic peptide
ILYQGNPYPK

SEQ ID NO: 19656 - protein, 9 aa, Artificial Sequence
  Description of Artificial Sequence: Synthetic peptide
ELYPSASLK

SEQ ID NO: 19657 - protein, 9 aa, Artificial Sequence
  Description of Artificial Sequence: Synthetic peptide
KILEPFRAK

SEQ ID NO: 19658 - protein, 9 aa, Artificial Sequence
  Description of Artificial Sequence: Synthetic peptide
ALTALIRPK

SEQ ID NO: 19659 - protein, 10 aa, Artificial Sequence
  Description of Artificial Sequence: Synthetic peptide
TVYYGVPVWK

SEQ ID NO: 19660 - protein, 11 aa, Artificial Sequence
  Description of Artificial Sequence: Synthetic peptide
TVNDIQKLVGK

SEQ ID NO: 19661 - protein, 9 aa, Artificial Sequence
  Description of Artificial Sequence: Synthetic peptide
LLNGSIAEK

SEQ ID NO: 19662 - protein, 10 aa, Artificial Sequence
  Description of Artificial Sequence: Synthetic peptide
RVLGTVAAKL

SEQ ID NO: 19663 - protein, 9 aa, Artificial Sequence
  Description of Artificial Sequence: Synthetic peptide
RVNISEIMK

SEQ ID NO: 19664 - protein, 10 aa, Artificial Sequence
  Description of Artificial Sequence: Synthetic peptide
KVMETQMNWK

SEQ ID NO: 19665 - protein, 9 aa, Artificial Sequence
  Description of Artificial Sequence: Synthetic peptide
TLNDTTNQK

SEQ ID NO: 19666 - protein, 10 aa, Artificial Sequence
  Description of Artificial Sequence: Synthetic peptide
IVQQQSNLLK

SEQ ID NO: 19667 - protein, 11 aa, Artificial Sequence
  Description of Artificial Sequence: Synthetic peptide
TVNDIQKLVGK

SEQ ID NO: 19668 - protein, 9 aa, Artificial Sequence
  Description of Artificial Sequence: Synthetic peptide
QIYPGIKVK

SEQ ID NO: 19669 - protein, 10 aa, Artificial Sequence
  Description of Artificial Sequence: Synthetic peptide
TVQPIQLPEK

SEQ ID NO: 19670 - protein, 10 aa, Artificial Sequence
  Description of Artificial Sequence: Synthetic peptide
TVQPVQLPEK

SEQ ID NO: 19671 - protein, 9 aa, Artificial Sequence
  Description of Artificial Sequence: Synthetic peptide
TLNDTTNQK

SEQ ID NO: 19672 - protein, 9 aa, Artificial Sequence
  Description of Artificial Sequence: Synthetic peptide
RVLGTVAAK

SEQ ID NO: 19673 - protein, 9 aa, Artificial Sequence
  Description of Artificial Sequence: Synthetic peptide
LLNGSIAEK

SEQ ID NO: 19674 - protein, 9 aa, Artificial Sequence
  Description of Artificial Sequence: Synthetic peptide
IIASDIQTK

SEQ ID NO: 19675 - protein, 9 aa, Artificial Sequence
  Description of Artificial Sequence: Synthetic peptide
GLDGLIYSK

SEQ ID NO: 19676 - protein, 9 aa, Artificial Sequence
  Description of Artificial Sequence: Synthetic peptide
SVIKQACPK

SEQ ID NO: 19677 - protein, 10 aa, Artificial Sequence
  Description of Artificial Sequence: Synthetic peptide
GSNFTSAAVK

SEQ ID NO: 19678 - protein, 10 aa, Artificial Sequence
  Description of Artificial Sequence: Synthetic peptide
GSNFTSGAVK

SEQ ID NO: 19679 - protein, 10 aa, Artificial Sequence
  Description of Artificial Sequence: Synthetic peptide
GSNFTSATVK

SEQ ID NO: 19680 - protein, 11 aa, Artificial Sequence
  Description of Artificial Sequence: Synthetic peptide
GVGAVSQDLAK

SEQ ID NO: 19681 - protein, 9 aa, Artificial Sequence
  Description of Artificial Sequence: Synthetic peptide
APAGFAILK

SEQ ID NO: 19682 - protein, 10 aa, Artificial Sequence
  Description of Artificial Sequence: Synthetic peptide
ILYQGNPYPK

SEQ ID NO: 19683 - protein, 11 aa, Artificial Sequence
  Description of Artificial Sequence: Synthetic peptide
QSQGVVESMNK

SEQ ID NO: 19684 - protein, 11 aa, Artificial Sequence
  Description of Artificial Sequence: Synthetic peptide
ALEKIEEIQNK

SEQ ID NO: 19685 - protein, 11 aa, Artificial Sequence
  Description of Artificial Sequence: Synthetic peptide
YVDGASNRETK

SEQ ID NO: 19686 - protein, 10 aa, Artificial Sequence
  Description of Artificial Sequence: Synthetic peptide
KIEEIQNKNK

SEQ ID NO: 19687 - protein, 9 aa, Artificial Sequence
  Description of Artificial Sequence: Synthetic peptide
RVNISEIMK

SEQ ID NO: 19688 - protein, 8 aa, Artificial Sequence
  Description of Artificial Sequence: Synthetic peptide
VLGTVAAK

SEQ ID NO: 19689 - protein, 9 aa, Artificial Sequence
  Description of Artificial Sequence: Synthetic peptide
AVDLSFFLK

SEQ ID NO: 19690 - protein, 9 aa, Artificial Sequence
  Description of Artificial Sequence: Synthetic peptide
RTNSPTSRK

SEQ ID NO: 19691 - protein, 11 aa, Artificial Sequence
  Description of Artificial Sequence: Synthetic peptide
ALNPGLLESAK

SEQ ID NO: 19692 - protein, 9 aa, Artificial Sequence
  Description of Artificial Sequence: Synthetic peptide
SNFTSATVK

SEQ ID NO: 19693 - protein, 9 aa, Artificial Sequence
  Description of Artificial Sequence: Synthetic peptide
SNFTSGAVK

SEQ ID NO: 19694 - protein, 9 aa, Artificial Sequence
  Description of Artificial Sequence: Synthetic peptide
KQLTEAVQK

SEQ ID NO: 19695 - protein, 9 aa, Artificial Sequence
  Description of Artificial Sequence: Synthetic peptide
VQQQSNLLK

SEQ ID NO: 19696 - protein, 9 aa, Artificial Sequence
  Description of Artificial Sequence: Synthetic peptide
ALTALIRPK

SEQ ID NO: 19697 - protein, 10 aa, Artificial Sequence
  Description of Artificial Sequence: Synthetic peptide
VVESMNKELK

SEQ ID NO: 19698 - protein, 9 aa, Artificial Sequence
  Description of Artificial Sequence: Synthetic peptide
QIYPGIKVK

SEQ ID NO: 19699 - protein, 10 aa, Artificial Sequence
  Description of Artificial Sequence: Synthetic peptide
IVQQQSNLLK

SEQ ID NO: 19700 - protein, 9 aa, Artificial Sequence
  Description of Artificial Sequence: Synthetic peptide
SVIKQACPK

SEQ ID NO: 19701 - protein, 10 aa, Artificial Sequence
  Description of Artificial Sequence: Synthetic peptide
TVQPVQLPEK

SEQ ID NO: 19702 - protein, 11 aa, Artificial Sequence
  Description of Artificial Sequence: Synthetic peptide
TVNDIQKLVGK

SEQ ID NO: 19703 - protein, 9 aa, Artificial Sequence
  Description of Artificial Sequence: Synthetic peptide
APAGFAILK

SEQ ID NO: 19704 - protein, 10 aa, Artificial Sequence
  Description of Artificial Sequence: Synthetic peptide
GSNFTSGAVK

SEQ ID NO: 19705 - protein, 10 aa, Artificial Sequence
  Description of Artificial Sequence: Synthetic peptide
TVQPIQLPEK

SEQ ID NO: 19706 - protein, 10 aa, Artificial Sequence
  Description of Artificial Sequence: Synthetic peptide
GSNFTSATVK

SEQ ID NO: 19707 - protein, 9 aa, Artificial Sequence
  Description of Artificial Sequence: Synthetic peptide
AVDLSFFLK

SEQ ID NO: 19708 - protein, 10 aa, Artificial Sequence
  Description of Artificial Sequence: Synthetic peptide
GSNFTSAAVK

SEQ ID NO: 19709 - protein, 10 aa, Artificial Sequence
  Description of Artificial Sequence: Synthetic peptide
GGLDGLIYSK

SEQ ID NO: 19710 - protein, 9 aa, Artificial Sequence
  Description of Artificial Sequence: Synthetic peptide
RVLGTVAAK

SEQ ID NO: 19711 - protein, 10 aa, Artificial Sequence
  Description of Artificial Sequence: Synthetic peptide
VTLNDTTNQK

SEQ ID NO: 19712 - protein, 10 aa, Artificial Sequence
  Description of Artificial Sequence: Synthetic peptide
VTLTDTTNQK

SEQ ID NO: 19713 - protein, 9 aa, Artificial Sequence
  Description of Artificial Sequence: Synthetic peptide
VQQQSNLLK

SEQ ID NO: 19714 - protein, 10 aa, Artificial Sequence
  Description of Artificial Sequence: Synthetic peptide
SQIYPGIKVK

SEQ ID NO: 19715 - protein, 11 aa, Artificial Sequence
  Description of Artificial Sequence: Synthetic peptide
YVDGASNRETK

SEQ ID NO: 19716 - protein, 9 aa, Artificial Sequence
  Description of Artificial Sequence: Synthetic peptide
IIASDIQTK

SEQ ID NO: 19717 - protein, 9 aa, Artificial Sequence
  Description of Artificial Sequence: Synthetic peptide
SNFTSATVK

SEQ ID NO: 19718 - protein, 10 aa, Artificial Sequence
  Description of Artificial Sequence: Synthetic peptide
VTNTNIMMQR

SEQ ID NO: 19719 - protein, 11 aa, Artificial Sequence
  Description of Artificial Sequence: Synthetic peptide
GVVESMNKELK

SEQ ID NO: 19720 - protein, 9 aa, Artificial Sequence
  Description of Artificial Sequence: Synthetic peptide
GLDGLIYSK

SEQ ID NO: 19721 - protein, 10 aa, Artificial Sequence
  Description of Artificial Sequence: Synthetic peptide
KVMETQMNWK

SEQ ID NO: 19722 - protein, 9 aa, Artificial Sequence
  Description of Artificial Sequence: Synthetic peptide
RVNISEIMK

SEQ ID NO: 19723 - protein, 11 aa, Artificial Sequence
  Description of Artificial Sequence: Synthetic peptide
GSIAEKEVIIK

SEQ ID NO: 19724 - protein, 8 aa, Artificial Sequence
  Description of Artificial Sequence: Synthetic peptide
TDIVPLTR

SEQ ID NO: 19725 - protein, 9 aa, Artificial Sequence
  Description of Artificial Sequence: Synthetic peptide
KTVEIVCYR

SEQ ID NO: 19726 - protein, 9 aa, Artificial Sequence
  Description of Artificial Sequence: Synthetic peptide
RTNSPTSRK

SEQ ID NO: 19727 - protein, 9 aa, Artificial Sequence
  Description of Artificial Sequence: Synthetic peptide
NYTGIIYTL

SEQ ID NO: 19728 - protein, 9 aa, Artificial Sequence
  Description of Artificial Sequence: Synthetic peptide
NYTGIIYSL

SEQ ID NO: 19729 - protein, 9 aa, Artificial Sequence
  Description of Artificial Sequence: Synthetic peptide
NYTRIIYNL

SEQ ID NO: 19730 - protein, 9 aa, Artificial Sequence
  Description of Artificial Sequence: Synthetic peptide
NETVNITCF

SEQ ID NO: 19731 - protein, 9 aa, Artificial Sequence
  Description of Artificial Sequence: Synthetic peptide
QYNDILIEI

SEQ ID NO: 19732 - protein, 9 aa, Artificial Sequence
  Description of Artificial Sequence: Synthetic peptide
QYNEVPIEI

SEQ ID NO: 19733 - protein, 9 aa, Artificial Sequence
  Description of Artificial Sequence: Synthetic peptide
VYIEYKKLL

SEQ ID NO: 19734 - protein, 9 aa, Artificial Sequence
  Description of Artificial Sequence: Synthetic peptide
IYQEPFKNL

SEQ ID NO: 19735 - protein, 9 aa, Artificial Sequence
  Description of Artificial Sequence: Synthetic peptide
RYLKDQQLL

SEQ ID NO: 19736 - protein, 10 aa, Artificial Sequence
  Description of Artificial Sequence: Synthetic peptide
YFNESTTINF

SEQ ID NO: 19737 - protein, 9 aa, Artificial Sequence
  Description of Artificial Sequence: Synthetic peptide
EELREQEHF

SEQ ID NO: 19738 - protein, 9 aa, Artificial Sequence
  Description of Artificial Sequence: Synthetic peptide
FYKQDVVSI

SEQ ID NO: 19739 - protein, 9 aa, Artificial Sequence
  Description of Artificial Sequence: Synthetic peptide
NYTGIIYTL

SEQ ID NO: 19740 - protein, 9 aa, Artificial Sequence
  Description of Artificial Sequence: Synthetic peptide
QYNEVPIEI

SEQ ID NO: 19741 - protein, 9 aa, Artificial Sequence
  Description of Artificial Sequence: Synthetic peptide
NYTGIIYSL

SEQ ID NO: 19742 - protein, 9 aa, Artificial Sequence
  Description of Artificial Sequence: Synthetic peptide
QYNDILIEI

SEQ ID NO: 19743 - protein, 9 aa, Artificial Sequence
  Description of Artificial Sequence: Synthetic peptide
NYTRIIYNL

SEQ ID NO: 19744 - protein, 9 aa, Artificial Sequence
  Description of Artificial Sequence: Synthetic peptide
IYQEPFKNL

SEQ ID NO: 19745 - protein, 9 aa, Artificial Sequence
  Description of Artificial Sequence: Synthetic peptide
RYLKDQQLL

SEQ ID NO: 19746 - protein, 9 aa, Artificial Sequence
  Description of Artificial Sequence: Synthetic peptide
FYKQDVVSI

SEQ ID NO: 19747 - protein, 9 aa, Artificial Sequence
  Description of Artificial Sequence: Synthetic peptide
AYCNVSSNW

SEQ ID NO: 19748 - protein, 10 aa, Artificial Sequence
  Description of Artificial Sequence: Synthetic peptide
YFNESTTINF

SEQ ID NO: 19749 - protein, 9 aa, Artificial Sequence
  Description of Artificial Sequence: Synthetic peptide
IYNTYGDTW

SEQ ID NO: 19750 - protein, 9 aa, Artificial Sequence
  Description of Artificial Sequence: Synthetic peptide
VYIEYKKLL

SEQ ID NO: 19751 - protein, 10 aa, Artificial Sequence
  Description of Artificial Sequence: Synthetic peptide
DTINEEAAEW

SEQ ID NO: 19752 - protein, 9 aa, Artificial Sequence
  Description of Artificial Sequence: Synthetic peptide
TVMETQRSW

SEQ ID NO: 19753 - protein, 9 aa, Artificial Sequence
  Description of Artificial Sequence: Synthetic peptide
EVIPMFSAL

SEQ ID NO: 19754 - protein, 9 aa, Artificial Sequence
  Description of Artificial Sequence: Synthetic peptide
EAILVITTY

SEQ ID NO: 19755 - protein, 10 aa, Artificial Sequence
  Description of Artificial Sequence: Synthetic peptide
EVQKQGLDQW

SEQ ID NO: 19756 - protein, 9 aa, Artificial Sequence
  Description of Artificial Sequence: Synthetic peptide
DIAGTTSTL

SEQ ID NO: 19757 - protein, 9 aa, Artificial Sequence
  Description of Artificial Sequence: Synthetic peptide
NVTENFNMW

SEQ ID NO: 19758 - protein, 9 aa, Artificial Sequence
  Description of Artificial Sequence: Synthetic peptide
NVTENFNIW

SEQ ID NO: 19759 - protein, 10 aa, Artificial Sequence
  Description of Artificial Sequence: Synthetic peptide
EVNIVTDSQY

SEQ ID NO: 19760 - protein, 9 aa, Artificial Sequence
  Description of Artificial Sequence: Synthetic peptide
DTMEALEKI

SEQ ID NO: 19761 - protein, 9 aa, Artificial Sequence
  Description of Artificial Sequence: Synthetic peptide
EAILVITTY

SEQ ID NO: 19762 - protein, 9 aa, Artificial Sequence
  Description of Artificial Sequence: Synthetic peptide
ETKTGKAGY

SEQ ID NO: 19763 - protein, 10 aa, Artificial Sequence
  Description of Artificial Sequence: Synthetic peptide
EVNIVTDSQY

SEQ ID NO: 19764 - protein, 9 aa, Artificial Sequence
  Description of Artificial Sequence: Synthetic peptide
ETKIGKAGY

SEQ ID NO: 19765 - protein, 9 aa, Artificial Sequence
  Description of Artificial Sequence: Synthetic peptide
EVIPMFSAL

SEQ ID NO: 19766 - protein, 9 aa, Artificial Sequence
  Description of Artificial Sequence: Synthetic peptide
ETPGIRYQY

SEQ ID NO: 19767 - protein, 10 aa, Artificial Sequence
  Description of Artificial Sequence: Synthetic peptide
ETFRPTGGNM

SEQ ID NO: 19768 - protein, 10 aa, Artificial Sequence
  Description of Artificial Sequence: Synthetic peptide
EVIPAETGQE

SEQ ID NO: 19769 - protein, 10 aa, Artificial Sequence
  Description of Artificial Sequence: Synthetic peptide
NTIGGHQAAM

SEQ ID NO: 19770 - protein, 9 aa, Artificial Sequence
  Description of Artificial Sequence: Synthetic peptide
GTEEIKSLY

SEQ ID NO: 19771 - protein, 9 aa, Artificial Sequence
  Description of Artificial Sequence: Synthetic peptide
EVIPAETGQ

SEQ ID NO: 19772 - protein, 9 aa, Artificial Sequence
  Description of Artificial Sequence: Synthetic peptide
GTQEIKSLY

SEQ ID NO: 19773 - protein, 11 aa, Artificial Sequence
  Description of Artificial Sequence: Synthetic peptide
QTGTEEIKSLY

SEQ ID NO: 19774 - protein, 9 aa, Artificial Sequence
  Description of Artificial Sequence: Synthetic peptide
EAILVITTY

SEQ ID NO: 19775 - protein, 9 aa, Artificial Sequence
  Description of Artificial Sequence: Synthetic peptide
EVIPMFSAL

SEQ ID NO: 19776 - protein, 9 aa, Artificial Sequence
  Description of Artificial Sequence: Synthetic peptide
DIAGTTSNL

SEQ ID NO: 19777 - protein, 10 aa, Artificial Sequence
  Description of Artificial Sequence: Synthetic peptide
EVNIVTDSQY

SEQ ID NO: 19778 - protein, 9 aa, Artificial Sequence
  Description of Artificial Sequence: Synthetic peptide
DIAGTTSTL

SEQ ID NO: 19779 - protein, 10 aa, Artificial Sequence
  Description of Artificial Sequence: Synthetic peptide
NTIGGHQAAM

SEQ ID NO: 19780 - protein, 10 aa, Artificial Sequence
  Description of Artificial Sequence: Synthetic peptide
ETFRPTGGNM

SEQ ID NO: 19781 - protein, 9 aa, Artificial Sequence
  Description of Artificial Sequence: Synthetic peptide
DTMEALEKI

SEQ ID NO: 19782 - protein, 10 aa, Artificial Sequence
  Description of Artificial Sequence: Synthetic peptide
EIFRPTGGDM

SEQ ID NO: 19783 - protein, 9 aa, Artificial Sequence
  Description of Artificial Sequence: Synthetic peptide
EVIPMFSAL

SEQ ID NO: 19784 - protein, 10 aa, Artificial Sequence
  Description of Artificial Sequence: Synthetic peptide
DIIATDIQTR

SEQ ID NO: 19785 - protein, 10 aa, Artificial Sequence
  Description of Artificial Sequence: Synthetic peptide
NTIGGHQAAM

SEQ ID NO: 19786 - protein, 9 aa, Artificial Sequence
  Description of Artificial Sequence: Synthetic peptide
DIAGTTSNL

SEQ ID NO: 19787 - protein, 9 aa, Artificial Sequence
  Description of Artificial Sequence: Synthetic peptide
EIIGNIRET

SEQ ID NO: 19788 - protein, 9 aa, Artificial Sequence
  Description of Artificial Sequence: Synthetic peptide
EAILVITTY

SEQ ID NO: 19789 - protein, 9 aa, Artificial Sequence
  Description of Artificial Sequence: Synthetic peptide
ETKTGKAGY

SEQ ID NO: 19790 - protein, 9 aa, Artificial Sequence
  Description of Artificial Sequence: Synthetic peptide
DIAGTTSTL

SEQ ID NO: 19791 - protein, 9 aa, Artificial Sequence
  Description of Artificial Sequence: Synthetic peptide
NQIDSISER

SEQ ID NO: 19792 - protein, 9 aa, Artificial Sequence
  Description of Artificial Sequence: Synthetic peptide
ETVNITCFR

SEQ ID NO: 19793 - protein, 11 aa, Artificial Sequence
  Description of Artificial Sequence: Synthetic peptide
ETFYVDGASNR

SEQ ID NO: 19794 - protein, 10 aa, Artificial Sequence
  Description of Artificial Sequence: Synthetic peptide
DNSDIKVVPR

SEQ ID NO: 19795 - protein, 10 aa, Artificial Sequence
  Description of Artificial Sequence: Synthetic peptide
ELVHQALSPR

SEQ ID NO: 19796 - protein, 9 aa, Artificial Sequence
  Description of Artificial Sequence: Synthetic peptide
NITGLILTR

SEQ ID NO: 19797 - protein, 9 aa, Artificial Sequence
  Description of Artificial Sequence: Synthetic peptide
SIALTVQAR

SEQ ID NO: 19798 - protein, 9 aa, Artificial Sequence
  Description of Artificial Sequence: Synthetic peptide
TVLDVGDAY

SEQ ID NO: 19799 - protein, 9 aa, Artificial Sequence
  Description of Artificial Sequence: Synthetic peptide
LYNTVATLY

SEQ ID NO: 19800 - protein, 9 aa, Artificial Sequence
  Description of Artificial Sequence: Synthetic peptide
YNSQVSHNY

SEQ ID NO: 19801 - protein, 9 aa, Artificial Sequence
  Description of Artificial Sequence: Synthetic peptide
LFNTEATLY

SEQ ID NO: 19802 - protein, 9 aa, Artificial Sequence
  Description of Artificial Sequence: Synthetic peptide
ILVQLQPSY

SEQ ID NO: 19803 - protein, 9 aa, Artificial Sequence
  Description of Artificial Sequence: Synthetic peptide
GTQEIKSLY

SEQ ID NO: 19804 - protein, 9 aa, Artificial Sequence
  Description of Artificial Sequence: Synthetic peptide
HMGPGQVLY

SEQ ID NO: 19805 - protein, 9 aa, Artificial Sequence
  Description of Artificial Sequence: Synthetic peptide
SFEPIPIHY

SEQ ID NO: 19806 - protein, 9 aa, Artificial Sequence
  Description of Artificial Sequence: Synthetic peptide
SFQPIPIHY

SEQ ID NO: 19807 - protein, 9 aa, Artificial Sequence
  Description of Artificial Sequence: Synthetic peptide
MWTIVYIEY

SEQ ID NO: 19808 - protein, 10 aa, Artificial Sequence
  Description of Artificial Sequence: Synthetic peptide
SLYNTVATLY

SEQ ID NO: 19809 - protein, 9 aa, Artificial Sequence
  Description of Artificial Sequence: Synthetic peptide
YNSQVSHNY

SEQ ID NO: 19810 - protein, 9 aa, Artificial Sequence
  Description of Artificial Sequence: Synthetic peptide
GFFPDWQNY

SEQ ID NO: 19811 - protein, 9 aa, Artificial Sequence
  Description of Artificial Sequence: Synthetic peptide
LYNTVATLY

SEQ ID NO: 19812 - protein, 9 aa, Artificial Sequence
  Description of Artificial Sequence: Synthetic peptide
LFNTEATLY

SEQ ID NO: 19813 - protein, 9 aa, Artificial Sequence
  Description of Artificial Sequence: Synthetic peptide
GYFPDWQNY

SEQ ID NO: 19814 - protein, 9 aa, Artificial Sequence
  Description of Artificial Sequence: Synthetic peptide
SFEPIPIHY

SEQ ID NO: 19815 - protein, 9 aa, Artificial Sequence
  Description of Artificial Sequence: Synthetic peptide
SFQPIPIHY

SEQ ID NO: 19816 - protein, 9 aa, Artificial Sequence
  Description of Artificial Sequence: Synthetic peptide
VWTIVFIEY

SEQ ID NO: 19817 - protein, 9 aa, Artificial Sequence
  Description of Artificial Sequence: Synthetic peptide
HMGPGQVLY

SEQ ID NO: 19818 - protein, 9 aa, Artificial Sequence
  Description of Artificial Sequence: Synthetic peptide
NFEPIPIHY

SEQ ID NO: 19819 - protein, 9 aa, Artificial Sequence
  Description of Artificial Sequence: Synthetic peptide
GTQEIKSLY

SEQ ID NO: 19820 - protein, 9 aa, Artificial Sequence
  Description of Artificial Sequence: Synthetic peptide
MWTIVYIEY

SEQ ID NO: 19821 - protein, 9 aa, Artificial Sequence
  Description of Artificial Sequence: Synthetic peptide
TVLDVGDAY

SEQ ID NO: 19822 - protein, 9 aa, Artificial Sequence
  Description of Artificial Sequence: Synthetic peptide
TEAVQKIAL

SEQ ID NO: 19823 - protein, 9 aa, Artificial Sequence
  Description of Artificial Sequence: Synthetic peptide
SERDWSNTL

SEQ ID NO: 19824 - protein, 9 aa, Artificial Sequence
  Description of Artificial Sequence: Synthetic peptide
AEVVQKIAL

SEQ ID NO: 19825 - protein, 9 aa, Artificial Sequence
  Description of Artificial Sequence: Synthetic peptide
SERIPSSCL

SEQ ID NO: 19826 - protein, 9 aa, Artificial Sequence
  Description of Artificial Sequence: Synthetic peptide
KELYPSASL

SEQ ID NO: 19827 - protein, 9 aa, Artificial Sequence
  Description of Artificial Sequence: Synthetic peptide
NETVNITCF

SEQ ID NO: 19828 - protein, 9 aa, Artificial Sequence
  Description of Artificial Sequence: Synthetic peptide
KELYPLTSL

SEQ ID NO: 19829 - protein, 9 aa, Artificial Sequence
  Description of Artificial Sequence: Synthetic peptide
GTQEIKSLY

SEQ ID NO: 19830 - protein, 10 aa, Artificial Sequence
  Description of Artificial Sequence: Synthetic peptide
KYNSQVSHNY

SEQ ID NO: 19831 - protein, 9 aa, Artificial Sequence
  Description of Artificial Sequence: Synthetic peptide
LQKGLGISY

SEQ ID NO: 19832 - protein, 9 aa, Artificial Sequence
  Description of Artificial Sequence: Synthetic peptide
YNSQVSHNY

SEQ ID NO: 19833 - protein, 11 aa, Artificial Sequence
  Description of Artificial Sequence: Synthetic peptide
QTGTEEIKSLY

SEQ ID NO: 19834 - protein, 9 aa, Artificial Sequence
  Description of Artificial Sequence: Synthetic peptide
GTEEIKSLY

SEQ ID NO: 19835 - protein, 10 aa, Artificial Sequence
  Description of Artificial Sequence: Synthetic peptide
VSIDNSNSSY

SEQ ID NO: 19836 - protein, 9 aa, Artificial Sequence
  Description of Artificial Sequence: Synthetic peptide
TVLDVGDAY

SEQ ID NO: 19837 - protein, 9 aa, Artificial Sequence
  Description of Artificial Sequence: Synthetic peptide
KAQEEHERY

SEQ ID NO: 19838 - protein, 10 aa, Artificial Sequence
  Description of Artificial Sequence: Synthetic peptide
ILKEPVHGVY

SEQ ID NO: 19839 - protein, 9 aa, Artificial Sequence
  Description of Artificial Sequence: Synthetic peptide
RAQEEHERY

SEQ ID NO: 19840 - protein, 11 aa, Artificial Sequence
  Description of Artificial Sequence: Synthetic peptide
QTGTQEIKSLY

SEQ ID NO: 19841 - protein, 10 aa, Artificial Sequence
  Description of Artificial Sequence: Synthetic peptide
FLQKGLGISY

SEQ ID NO: 19842 - protein, 11 aa, Artificial Sequence
  Description of Artificial Sequence: Synthetic peptide
VVPIDSNNKNY

SEQ ID NO: 19843 - protein, 10 aa, Artificial Sequence
  Description of Artificial Sequence: Synthetic peptide
KDNSQVSQNY

SEQ ID NO: 19844 - protein, 9 aa, Artificial Sequence
  Description of Artificial Sequence: Synthetic peptide
GTQEIKSLY

SEQ ID NO: 19845 - protein, 9 aa, Artificial Sequence
  Description of Artificial Sequence: Synthetic peptide
LQKGLGISY

SEQ ID NO: 19846 - protein, 9 aa, Artificial Sequence
  Description of Artificial Sequence: Synthetic peptide
GTEEIKSLY

SEQ ID NO: 19847 - protein, 10 aa, Artificial Sequence
  Description of Artificial Sequence: Synthetic peptide
KYNSQVSHNY

SEQ ID NO: 19848 - protein, 9 aa, Artificial Sequence
  Description of Artificial Sequence: Synthetic peptide
YNSQVSHNY

SEQ ID NO: 19849 - protein, 9 aa, Artificial Sequence
  Description of Artificial Sequence: Synthetic peptide
VVGDIRRAY

SEQ ID NO: 19850 - protein, 11 aa, Artificial Sequence
  Description of Artificial Sequence: Synthetic peptide
QTGTEEIKSLY

SEQ ID NO: 19851 - protein, 11 aa, Artificial Sequence
  Description of Artificial Sequence: Synthetic peptide
QVNNTNIIMQR

SEQ ID NO: 19852 - protein, 9 aa, Artificial Sequence
  Description of Artificial Sequence: Synthetic peptide
KTVEIVCYR

SEQ ID NO: 19853 - protein, 10 aa, Artificial Sequence
  Description of Artificial Sequence: Synthetic peptide
VTNTNIMMQR

SEQ ID NO: 19854 - protein, 9 aa, Artificial Sequence
  Description of Artificial Sequence: Synthetic peptide
KSWPQVRER

SEQ ID NO: 19855 - protein, 9 aa, Artificial Sequence
  Description of Artificial Sequence: Synthetic peptide
ATLYCVHQR

SEQ ID NO: 19856 - protein, 9 aa, Artificial Sequence
  Description of Artificial Sequence: Synthetic peptide
RQIVRMWQR

SEQ ID NO: 19857 - protein, 8 aa, Artificial Sequence
  Description of Artificial Sequence: Synthetic peptide
NTNIIMQR

SEQ ID NO: 19858 - protein, 11 aa, Artificial Sequence
  Description of Artificial Sequence: Synthetic peptide
TVNDIQKLVGK

SEQ ID NO: 19859 - protein, 9 aa, Artificial Sequence
  Description of Artificial Sequence: Synthetic peptide
KGLGISYGR

SEQ ID NO: 19860 - protein, 11 aa, Artificial Sequence
  Description of Artificial Sequence: Synthetic peptide
KGRPGNFLQSR

SEQ ID NO: 19861 - protein, 11 aa, Artificial Sequence
  Description of Artificial Sequence: Synthetic peptide
GSKSEGDIIIR

SEQ ID NO: 19862 - protein, 9 aa, Artificial Sequence
  Description of Artificial Sequence: Synthetic peptide
CTRPANNTR

SEQ ID NO: 19863 - protein, 11 aa, Artificial Sequence
  Description of Artificial Sequence: Synthetic peptide
RTNSPTSRKLR

SEQ ID NO: 19864 - protein, 11 aa, Artificial Sequence
  Description of Artificial Sequence: Synthetic peptide
QVTNTNIMMQR

SEQ ID NO: 19865 - protein, 9 aa, Artificial Sequence
  Description of Artificial Sequence: Synthetic peptide
KGLGISHGR

SEQ ID NO: 19866 - protein, 9 aa, Artificial Sequence
  Description of Artificial Sequence: Synthetic peptide
SIVGWPQVR

SEQ ID NO: 19867 - protein, 11 aa, Artificial Sequence
  Description of Artificial Sequence: Synthetic peptide
VGPTPVNIIGR

SEQ ID NO: 19868 - protein, 8 aa, Artificial Sequence
  Description of Artificial Sequence: Synthetic peptide
NTNIMMQR

SEQ ID NO: 19869 - protein, 11 aa, Artificial Sequence
  Description of Artificial Sequence: Synthetic peptide
RQNQIDSISER

SEQ ID NO: 19870 - protein, 9 aa, Artificial Sequence
  Description of Artificial Sequence: Synthetic peptide
IVNRVRQGY

SEQ ID NO: 19871 - protein, 9 aa, Artificial Sequence
  Description of Artificial Sequence: Synthetic peptide
VVGDIRRAY

SEQ ID NO: 19872 - protein, 9 aa, Artificial Sequence
  Description of Artificial Sequence: Synthetic peptide
TVMETQRSW

SEQ ID NO: 19873 - protein, 9 aa, Artificial Sequence
  Description of Artificial Sequence: Synthetic peptide
IIANVTENF

SEQ ID NO: 19874 - protein, 9 aa, Artificial Sequence
  Description of Artificial Sequence: Synthetic peptide
KVMETQMNW

SEQ ID NO: 19875 - protein, 9 aa, Artificial Sequence
  Description of Artificial Sequence: Synthetic peptide
NNTNIIMQR

SEQ ID NO: 19876 - protein, 11 aa, Artificial Sequence
  Description of Artificial Sequence: Synthetic peptide
ETFYVDGASNR

SEQ ID NO: 19877 - protein, 11 aa, Artificial Sequence
  Description of Artificial Sequence: Synthetic peptide
ETFYVDGAANR

SEQ ID NO: 19878 - protein, 10 aa, Artificial Sequence
  Description of Artificial Sequence: Synthetic peptide
DNSDIKVVPR

SEQ ID NO: 19879 - protein, 11 aa, Artificial Sequence
  Description of Artificial Sequence: Synthetic peptide
QVNNTNIIMQR

SEQ ID NO: 19880 - protein, 9 aa, Artificial Sequence
  Description of Artificial Sequence: Synthetic peptide
TNTNIMMQR

SEQ ID NO: 19881 - protein, 10 aa, Artificial Sequence
  Description of Artificial Sequence: Synthetic peptide
DNSEIKVVPR

SEQ ID NO: 19882 - protein, 11 aa, Artificial Sequence
  Description of Artificial Sequence: Synthetic peptide
EARELSPEQTR

SEQ ID NO: 19883 - protein, 10 aa, Artificial Sequence
  Description of Artificial Sequence: Synthetic peptide
VNNTNIIMQR

SEQ ID NO: 19884 - protein, 11 aa, Artificial Sequence
  Description of Artificial Sequence: Synthetic peptide
DVKQLTEAVQK

SEQ ID NO: 19885 - protein, 10 aa, Artificial Sequence
  Description of Artificial Sequence: Synthetic peptide
DIIATDIQTR

SEQ ID NO: 19886 - protein, 11 aa, Artificial Sequence
  Description of Artificial Sequence: Synthetic peptide
EARELSPEQAR

SEQ ID NO: 19887 - protein, 9 aa, Artificial Sequence
  Description of Artificial Sequence: Synthetic peptide
DAKAYSTEK

SEQ ID NO: 19888 - protein, 11 aa, Artificial Sequence
  Description of Artificial Sequence: Synthetic peptide
ESLAFQQGEAR

SEQ ID NO: 19889 - protein, 8 aa, Artificial Sequence
  Description of Artificial Sequence: Synthetic peptide
DFILIVAR

SEQ ID NO: 19890 - protein, 8 aa, Artificial Sequence
  Description of Artificial Sequence: Synthetic peptide
NTNIIMQR

SEQ ID NO: 19891 - protein, 9 aa, Artificial Sequence
  Description of Artificial Sequence: Synthetic peptide
QARVLAVER

SEQ ID NO: 19892 - protein, 11 aa, Artificial Sequence
  Description of Artificial Sequence: Synthetic peptide
DTEELADLVER

SEQ ID NO: 19893 - protein, 8 aa, Artificial Sequence
  Description of Artificial Sequence: Synthetic peptide
DFVLIVAR

SEQ ID NO: 19894 - protein, 9 aa, Artificial Sequence
  Description of Artificial Sequence: Synthetic peptide
NITGLILTR

SEQ ID NO: 19895 - protein, 9 aa, Artificial Sequence
  Description of Artificial Sequence: Synthetic peptide
ETVNITCFR

SEQ ID NO: 19896 - protein, 9 aa, Artificial Sequence
  Description of Artificial Sequence: Synthetic peptide
QARILAVER

SEQ ID NO: 19897 - protein, 9 aa, Artificial Sequence
  Description of Artificial Sequence: Synthetic peptide
DAKSYSTEK

SEQ ID NO: 19898 - protein, 9 aa, Artificial Sequence
  Description of Artificial Sequence: Synthetic peptide
DTWEKIRLR

SEQ ID NO: 19899 - protein, 11 aa, Artificial Sequence
  Description of Artificial Sequence: Synthetic peptide
ETFYVDGASNR

SEQ ID NO: 19900 - protein, 11 aa, Artificial Sequence
  Description of Artificial Sequence: Synthetic peptide
ETFYVDGAANR

SEQ ID NO: 19901 - protein, 9 aa, Artificial Sequence
  Description of Artificial Sequence: Synthetic peptide
NNTNIIMQR

SEQ ID NO: 19902 - protein, 9 aa, Artificial Sequence
  Description of Artificial Sequence: Synthetic peptide
TNTNIMMQR

SEQ ID NO: 19903 - protein, 9 aa, Artificial Sequence
  Description of Artificial Sequence: Synthetic peptide
ETVNITCFR

SEQ ID NO: 19904 - protein, 11 aa, Artificial Sequence
  Description of Artificial Sequence: Synthetic peptide
QVNNTNIIMQR

SEQ ID NO: 19905 - protein, 11 aa, Artificial Sequence
  Description of Artificial Sequence: Synthetic peptide
EARELSPEQTR

SEQ ID NO: 19906 - protein, 8 aa, Artificial Sequence
  Description of Artificial Sequence: Synthetic peptide
NTNIIMQR

SEQ ID NO: 19907 - protein, 10 aa, Artificial Sequence
  Description of Artificial Sequence: Synthetic peptide
DNSDIKVVPR

SEQ ID NO: 19908 - protein, 11 aa, Artificial Sequence
  Description of Artificial Sequence: Synthetic peptide
EARELSPEQAR

SEQ ID NO: 19909 - protein, 9 aa, Artificial Sequence
  Description of Artificial Sequence: Synthetic peptide
QARVLAVER

SEQ ID NO: 19910 - protein, 9 aa, Artificial Sequence
  Description of Artificial Sequence: Synthetic peptide
FYVDGASNR

SEQ ID NO: 19911 - protein, 8 aa, Artificial Sequence
  Description of Artificial Sequence: Synthetic peptide
NTNIMMQR

SEQ ID NO: 19912 - protein, 9 aa, Artificial Sequence
  Description of Artificial Sequence: Synthetic peptide
QARILAVER

SEQ ID NO: 19913 - protein, 9 aa, Artificial Sequence
  Description of Artificial Sequence: Synthetic peptide
FYVDGAANR

SEQ ID NO: 19914 - protein, 9 aa, Artificial Sequence
  Description of Artificial Sequence: Synthetic peptide
QTVEINCTR

SEQ ID NO: 19915 - protein, 9 aa, Artificial Sequence
  Description of Artificial Sequence: Synthetic peptide
EYRKVLRQR

SEQ ID NO: 19916 - protein, 11 aa, Artificial Sequence
  Description of Artificial Sequence: Synthetic peptide
TVNDIQKLVGK

SEQ ID NO: 19917 - protein, 11 aa, Artificial Sequence
  Description of Artificial Sequence: Synthetic peptide
ESLAFQQGEAR

SEQ ID NO: 19918 - protein, 9 aa, Artificial Sequence
  Description of Artificial Sequence: Synthetic peptide
ETHCNISER

SEQ ID NO: 19919 - protein, 9 aa, Artificial Sequence
  Description of Artificial Sequence: Synthetic peptide
ESNSSETFR

SEQ ID NO: 19920 - protein, 10 aa, Artificial Sequence
  Description of Artificial Sequence: Synthetic peptide
DNSEIKVVPR

SEQ ID NO: 19921 - protein, 9 aa, Artificial Sequence
  Description of Artificial Sequence: Synthetic peptide
NSEIKVVPR

SEQ ID NO: 19922 - protein, 9 aa, Artificial Sequence
  Description of Artificial Sequence: Synthetic peptide
NSDIKVVPR

SEQ ID NO: 19923 - protein, 9 aa, Artificial Sequence
  Description of Artificial Sequence: Synthetic peptide
EYKKLLRQR

SEQ ID NO: 19924 - protein, 10 aa, Artificial Sequence
  Description of Artificial Sequence: Synthetic peptide
VTNTNIMMQR

SEQ ID NO: 19925 - protein, 9 aa, Artificial Sequence
  Description of Artificial Sequence: Synthetic peptide
TALIKPKKR

SEQ ID NO: 19926 - protein, 10 aa, Artificial Sequence
  Description of Artificial Sequence: Synthetic peptide
ELKKIIGQVR

SEQ ID NO: 19927 - protein, 10 aa, Artificial Sequence
  Description of Artificial Sequence: Synthetic peptide
VNNTNIIMQR

SEQ ID NO: 19928 - protein, 9 aa, Artificial Sequence
  Description of Artificial Sequence: Synthetic peptide
NITGLILTR

SEQ ID NO: 19929 - protein, 8 aa, Artificial Sequence
  Description of Artificial Sequence: Synthetic peptide
DFILIVAR

SEQ ID NO: 19930 - protein, 10 aa, Artificial Sequence
  Description of Artificial Sequence: Synthetic peptide
DIIATDIQTR

SEQ ID NO: 19931 - protein, 10 aa, Artificial Sequence
  Description of Artificial Sequence: Synthetic peptide
ETFRPTGGNM

SEQ ID NO: 19932 - protein, 9 aa, Artificial Sequence
  Description of Artificial Sequence: Synthetic peptide
FNLPPIVAK

SEQ ID NO: 19933 - protein, 10 aa, Artificial Sequence
  Description of Artificial Sequence: Synthetic peptide
SNITGLILTR

SEQ ID NO: 19934 - protein, 11 aa, Artificial Sequence
  Description of Artificial Sequence: Synthetic peptide
ETFYVDGASNR

SEQ ID NO: 19935 - protein, 11 aa, Artificial Sequence
  Description of Artificial Sequence: Synthetic peptide
ETFYVDGAANR

SEQ ID NO: 19936 - protein, 9 aa, Artificial Sequence
  Description of Artificial Sequence: Synthetic peptide
NNTNIIMQR

SEQ ID NO: 19937 - protein, 11 aa, Artificial Sequence
  Description of Artificial Sequence: Synthetic peptide
QVNNTNIIMQR

SEQ ID NO: 19938 - protein, 10 aa, Artificial Sequence
  Description of Artificial Sequence: Synthetic peptide
DIIATDIQTR

SEQ ID NO: 19939 - protein, 9 aa, Artificial Sequence
  Description of Artificial Sequence: Synthetic peptide
QTVEINCTR

SEQ ID NO: 19940 - protein, 9 aa, Artificial Sequence
  Description of Artificial Sequence: Synthetic peptide
ETVNITCFR

SEQ ID NO: 19941 - protein, 10 aa, Artificial Sequence
  Description of Artificial Sequence: Synthetic peptide
DNSDIKVVPR

SEQ ID NO: 19942 - protein, 9 aa, Artificial Sequence
  Description of Artificial Sequence: Synthetic peptide
NITGLILTR

SEQ ID NO: 19943 - protein, 11 aa, Artificial Sequence
  Description of Artificial Sequence: Synthetic peptide
QVTNTNIMMQR

SEQ ID NO: 19944 - protein, 9 aa, Artificial Sequence
  Description of Artificial Sequence: Synthetic peptide
TNTNIMMQR

SEQ ID NO: 19945 - protein, 11 aa, Artificial Sequence
  Description of Artificial Sequence: Synthetic peptide
ETFRPTGGNMK

SEQ ID NO: 19946 - protein, 11 aa, Artificial Sequence
  Description of Artificial Sequence: Synthetic peptide
TVNDIQKLVGK

SEQ ID NO: 19947 - protein, 10 aa, Artificial Sequence
  Description of Artificial Sequence: Synthetic peptide
ATGAVIGNIR

SEQ ID NO: 19948 - protein, 10 aa, Artificial Sequence
  Description of Artificial Sequence: Synthetic peptide
TSNNSTEIFR

SEQ ID NO: 19949 - protein, 11 aa, Artificial Sequence
  Description of Artificial Sequence: Synthetic peptide
ETFRPTGGDMK

SEQ ID NO: 19950 - protein, 10 aa, Artificial Sequence
  Description of Artificial Sequence: Synthetic peptide
DNSEIKVVPR

SEQ ID NO: 19951 - protein, 10 aa, Artificial Sequence
  Description of Artificial Sequence: Synthetic peptide
VTNTNIMMQR

SEQ ID NO: 19952 - protein, 11 aa, Artificial Sequence
  Description of Artificial Sequence: Synthetic peptide
TAIAVAAGTDR

SEQ ID NO: 19953 - protein, 10 aa, Artificial Sequence
  Description of Artificial Sequence: Synthetic peptide
ATGEIIGNIR

SEQ ID NO: 19954 - protein, 9 aa, Artificial Sequence
  Description of Artificial Sequence: Synthetic peptide
TGAVIGNIR

SEQ ID NO: 19955 - protein, 9 aa, Artificial Sequence
  Description of Artificial Sequence: Synthetic peptide
NSEIKVVPR

SEQ ID NO: 19956 - protein, 10 aa, Artificial Sequence
  Description of Artificial Sequence: Synthetic peptide
EVNIVTDSQY

SEQ ID NO: 19957 - protein, 9 aa, Artificial Sequence
  Description of Artificial Sequence: Synthetic peptide
EPLGVAPTR

SEQ ID NO: 19958 - protein, 11 aa, Artificial Sequence
  Description of Artificial Sequence: Synthetic peptide
EIEPLGVAPTR

SEQ ID NO: 19959 - protein, 9 aa, Artificial Sequence
  Description of Artificial Sequence: Synthetic peptide
NSDIKVVPR

SEQ ID NO: 19960 - protein, 11 aa, Artificial Sequence
  Description of Artificial Sequence: Synthetic peptide
STSNNSTEIFR

SEQ ID NO: 19961 - protein, 10 aa, Artificial Sequence
  Description of Artificial Sequence: Synthetic peptide
ASITLTVQVR

SEQ ID NO: 19962 - protein, 10 aa, Artificial Sequence
  Description of Artificial Sequence: Synthetic peptide
SIAEGDIIIR

SEQ ID NO: 19963 - protein, 11 aa, Artificial Sequence
  Description of Artificial Sequence: Synthetic peptide
DVKQLTEAVQK

SEQ ID NO: 19964 - protein, 9 aa, Artificial Sequence
  Description of Artificial Sequence: Synthetic peptide
SIALTVQAR

SEQ ID NO: 19965 - protein, 8 aa, Artificial Sequence
  Description of Artificial Sequence: Synthetic peptide
NTNIIMQR

SEQ ID NO: 19966 - protein, 10 aa, Artificial Sequence
  Description of Artificial Sequence: Synthetic peptide
DCFSDSAIRK

SEQ ID NO: 19967 - protein, 9 aa, Artificial Sequence
  Description of Artificial Sequence: Synthetic peptide
FAVLAIVNR

SEQ ID NO: 19968 - protein, 9 aa, Artificial Sequence
  Description of Artificial Sequence: Synthetic peptide
IIATDIQTR

SEQ ID NO: 19969 - protein, 11 aa, Artificial Sequence
  Description of Artificial Sequence: Synthetic peptide
EIFRPTGGDMK

SEQ ID NO: 19970 - protein, 10 aa, Artificial Sequence
  Description of Artificial Sequence: Synthetic peptide
VPVDPGEVER

SEQ ID NO: 19971 - protein, 10 aa, Artificial Sequence
  Description of Artificial Sequence: Synthetic peptide
DVVPIDSNNK

SEQ ID NO: 19972 - protein, 9 aa, Artificial Sequence
  Description of Artificial Sequence: Synthetic peptide
ITTEIGDRR

SEQ ID NO: 19973 - protein, 8 aa, Artificial Sequence
  Description of Artificial Sequence: Synthetic peptide
TDIVPLTR

SEQ ID NO: 19974 - protein, 9 aa, Artificial Sequence
  Description of Artificial Sequence: Synthetic peptide
NITGLLLTR

SEQ ID NO: 19975 - protein, 10 aa, Artificial Sequence
  Description of Artificial Sequence: Synthetic peptide
ASIALTVQAR

SEQ ID NO: 19976 - protein, 9 aa, Artificial Sequence
  Description of Artificial Sequence: Synthetic peptide
SITLTVQVR

SEQ ID NO: 19977 - protein, 11 aa, Artificial Sequence
  Description of Artificial Sequence: Synthetic peptide
TAIAVAEGTDR

SEQ ID NO: 19978 - protein, 11 aa, Artificial Sequence
  Description of Artificial Sequence: Synthetic peptide
VVTLTDTTNQK

SEQ ID NO: 19979 - protein, 10 aa, Artificial Sequence
  Description of Artificial Sequence: Synthetic peptide
SNITGLILTR

SEQ ID NO: 19980 - protein, 11 aa, Artificial Sequence
  Description of Artificial Sequence: Synthetic peptide
VGPTPVNIIGR

SEQ ID NO: 19981 - protein, 10 aa, Artificial Sequence
  Description of Artificial Sequence: Synthetic peptide
ESWTVNDIQK

SEQ ID NO: 19982 - protein, 11 aa, Artificial Sequence
  Description of Artificial Sequence: Synthetic peptide
EIEPLGVAPTK

SEQ ID NO: 19983 - protein, 11 aa, Artificial Sequence
  Description of Artificial Sequence: Synthetic peptide
IGPTPVNIIGR

SEQ ID NO: 19984 - protein, 11 aa, Artificial Sequence
  Description of Artificial Sequence: Synthetic peptide
DTEELADLVER

SEQ ID NO: 19985 - protein, 10 aa, Artificial Sequence
  Description of Artificial Sequence: Synthetic peptide
DCFSEAAIRK

SEQ ID NO: 19986 - protein, 9 aa, Artificial Sequence
  Description of Artificial Sequence: Synthetic peptide
SRIGIIPQR

SEQ ID NO: 19987 - protein, 9 aa, Artificial Sequence
  Description of Artificial Sequence: Synthetic peptide
ETAFFILKL

SEQ ID NO: 19988 - protein, 9 aa, Artificial Sequence
  Description of Artificial Sequence: Synthetic peptide
EAAFFILKL

SEQ ID NO: 19989 - protein, 9 aa, Artificial Sequence
  Description of Artificial Sequence: Synthetic peptide
STVTINETV

SEQ ID NO: 19990 - protein, 9 aa, Artificial Sequence
  Description of Artificial Sequence: Synthetic peptide
ETVTLPCKI

SEQ ID NO: 19991 - protein, 9 aa, Artificial Sequence
  Description of Artificial Sequence: Synthetic peptide
QLTEVVQKI

SEQ ID NO: 19992 - protein, 9 aa, Artificial Sequence
  Description of Artificial Sequence: Synthetic peptide
QLAEVVQKI

SEQ ID NO: 19993 - protein, 9 aa, Artificial Sequence
  Description of Artificial Sequence: Synthetic peptide
TVNDIQKLV

SEQ ID NO: 19994 - protein, 9 aa, Artificial Sequence
  Description of Artificial Sequence: Synthetic peptide
AVFAIVNRV

SEQ ID NO: 19995 - protein, 9 aa, Artificial Sequence
  Description of Artificial Sequence: Synthetic peptide
TTSNLQEQI

SEQ ID NO: 19996 - protein, 9 aa, Artificial Sequence
  Description of Artificial Sequence: Synthetic peptide
ESFGFGEKI

SEQ ID NO: 19997 - protein, 9 aa, Artificial Sequence
  Description of Artificial Sequence: Synthetic peptide
IVAVIIAVI

SEQ ID NO: 19998 - protein, 9 aa, Artificial Sequence
  Description of Artificial Sequence: Synthetic peptide
DIAAIVGLI

SEQ ID NO: 19999 - protein, 9 aa, Artificial Sequence
  Description of Artificial Sequence: Synthetic peptide
NSSYILINC

SEQ ID NO: 20000 - protein, 9 aa, Artificial Sequence
  Description of Artificial Sequence: Synthetic peptide
EIKSLYNTV

SEQ ID NO: 20001 - protein, 9 aa, Artificial Sequence
  Description of Artificial Sequence: Synthetic peptide
ETVNITCFR

SEQ ID NO: 20002 - protein, 11 aa, Artificial Sequence
  Description of Artificial Sequence: Synthetic peptide
ETFYVDGASNR

SEQ ID NO: 20003 - protein, 9 aa, Artificial Sequence
  Description of Artificial Sequence: Synthetic peptide
YTAFTIPSI

SEQ ID NO: 20004 - protein, 9 aa, Artificial Sequence
  Description of Artificial Sequence: Synthetic peptide
NTVATLYCV

SEQ ID NO: 20005 - protein, 10 aa, Artificial Sequence
  Description of Artificial Sequence: Synthetic peptide
KVVEIEPLGV

SEQ ID NO: 20006 - protein, 9 aa, Artificial Sequence
  Description of Artificial Sequence: Synthetic peptide
GAASITLTV

SEQ ID NO: 20007 - protein, 9 aa, Artificial Sequence
  Description of Artificial Sequence: Synthetic peptide
TTSTLQEQI

SEQ ID NO: 20008 - protein, 9 aa, Artificial Sequence
  Description of Artificial Sequence: Synthetic peptide
DIAGTTSNL

SEQ ID NO: 20009 - protein, 9 aa, Artificial Sequence
  Description of Artificial Sequence: Synthetic peptide
DTMEALEKI

SEQ ID NO: 20010 - protein, 9 aa, Artificial Sequence
  Description of Artificial Sequence: Synthetic peptide
TVSSNFPQI

SEQ ID NO: 20011 - protein, 9 aa, Artificial Sequence
  Description of Artificial Sequence: Synthetic peptide
ATGEIIGNI

SEQ ID NO: 20012 - protein, 9 aa, Artificial Sequence
  Description of Artificial Sequence: Synthetic peptide
EVIPMFSAL

SEQ ID NO: 20013 - protein, 11 aa, Artificial Sequence
  Description of Artificial Sequence: Synthetic peptide
EVIPAETGQEA

SEQ ID NO: 20014 - protein, 10 aa, Artificial Sequence
  Description of Artificial Sequence: Synthetic peptide
NTIGGHQAAM

SEQ ID NO: 20015 - protein, 10 aa, Artificial Sequence
  Description of Artificial Sequence: Synthetic peptide
ETFRPTGGNM

SEQ ID NO: 20016 - protein, 9 aa, Artificial Sequence
  Description of Artificial Sequence: Synthetic peptide
GAASIALTV

SEQ ID NO: 20017 - protein, 11 aa, Artificial Sequence
  Description of Artificial Sequence: Synthetic peptide
ETFYVDGAANR

SEQ ID NO: 20018 - protein, 9 aa, Artificial Sequence
  Description of Artificial Sequence: Synthetic peptide
DVKQLTEAV

SEQ ID NO: 20019 - protein, 9 aa, Artificial Sequence
  Description of Artificial Sequence: Synthetic peptide
NATAIAVAA

SEQ ID NO: 20020 - protein, 9 aa, Artificial Sequence
  Description of Artificial Sequence: Synthetic peptide
NAKTIIVQL

SEQ ID NO: 20021 - protein, 11 aa, Artificial Sequence
  Description of Artificial Sequence: Synthetic peptide
ENSTVTINETV

SEQ ID NO: 20022 - protein, 9 aa, Artificial Sequence
  Description of Artificial Sequence: Synthetic peptide
SAKELIAEV

SEQ ID NO: 20023 - protein, 9 aa, Artificial Sequence
  Description of Artificial Sequence: Synthetic peptide
MTGNPPIPV

SEQ ID NO: 20024 - protein, 9 aa, Artificial Sequence
  Description of Artificial Sequence: Synthetic peptide
QNYPIVQNL

SEQ ID NO: 20025 - protein, 9 aa, Artificial Sequence
  Description of Artificial Sequence: Synthetic peptide
NAKNIIVQL

SEQ ID NO: 20026 - protein, 9 aa, Artificial Sequence
  Description of Artificial Sequence: Synthetic peptide
AVLAIVNRV

SEQ ID NO: 20027 - protein, 9 aa, Artificial Sequence
  Description of Artificial Sequence: Synthetic peptide
EIMTHTFNC

SEQ ID NO: 20028 - protein, 9 aa, Artificial Sequence
  Description of Artificial Sequence: Synthetic peptide
IPIGPGQVL

SEQ ID NO: 20029 - protein, 9 aa, Artificial Sequence
  Description of Artificial Sequence: Synthetic peptide
YPSASLKSL

SEQ ID NO: 20030 - protein, 9 aa, Artificial Sequence
  Description of Artificial Sequence: Synthetic peptide
VPLTREAEL

SEQ ID NO: 20031 - protein, 10 aa, Artificial Sequence
  Description of Artificial Sequence: Synthetic peptide
SPSPTITNPL

SEQ ID NO: 20032 - protein, 10 aa, Artificial Sequence
  Description of Artificial Sequence: Synthetic peptide
RPAEPVPLQL

SEQ ID NO: 20033 - protein, 8 aa, Artificial Sequence
  Description of Artificial Sequence: Synthetic peptide
TVRVGGQL

SEQ ID NO: 20034 - protein, 8 aa, Artificial Sequence
  Description of Artificial Sequence: Synthetic peptide
KPVVSTQL

SEQ ID NO: 20035 - protein, 10 aa, Artificial Sequence
  Description of Artificial Sequence: Synthetic peptide
SPIETVPVKL

SEQ ID NO: 20036 - protein, 9 aa, Artificial Sequence
  Description of Artificial Sequence: Synthetic peptide
SPAIFQCSM

SEQ ID NO: 20037 - protein, 9 aa, Artificial Sequence
  Description of Artificial Sequence: Synthetic peptide
TEAVQKIAL

SEQ ID NO: 20038 - protein, 9 aa, Artificial Sequence
  Description of Artificial Sequence: Synthetic peptide
TPQDLNTML

SEQ ID NO: 20039 - protein, 8 aa, Artificial Sequence
  Description of Artificial Sequence: Synthetic peptide
EAVQKIAL

SEQ ID NO: 20040 - protein, 9 aa, Artificial Sequence
  Description of Artificial Sequence: Synthetic peptide
VPLTREAEL

SEQ ID NO: 20041 - protein, 8 aa, Artificial Sequence
  Description of Artificial Sequence: Synthetic peptide
EVVQKIAL

SEQ ID NO: 20042 - protein, 9 aa, Artificial Sequence
  Description of Artificial Sequence: Synthetic peptide
EAAIRKAIL

SEQ ID NO: 20043 - protein, 9 aa, Artificial Sequence
  Description of Artificial Sequence: Synthetic peptide
ELKNSAISL

SEQ ID NO: 20044 - protein, 9 aa, Artificial Sequence
  Description of Artificial Sequence: Synthetic peptide
SISERILSA

SEQ ID NO: 20045 - protein, 9 aa, Artificial Sequence
  Description of Artificial Sequence: Synthetic peptide
YPGIKVKQL

SEQ ID NO: 20046 - protein, 9 aa, Artificial Sequence
  Description of Artificial Sequence: Synthetic peptide
DVKQLTEAV

SEQ ID NO: 20047 - protein, 9 aa, Artificial Sequence
  Description of Artificial Sequence: Synthetic peptide
DSAIRKAIL

SEQ ID NO: 20048 - protein, 9 aa, Artificial Sequence
  Description of Artificial Sequence: Synthetic peptide
DPNPREITM

SEQ ID NO: 20049 - protein, 8 aa, Artificial Sequence
  Description of Artificial Sequence: Synthetic peptide
TTNQKTEL

SEQ ID NO: 20050 - protein, 9 aa, Artificial Sequence
  Description of Artificial Sequence: Synthetic peptide
QLQARILAV

SEQ ID NO: 20051 - protein, 8 aa, Artificial Sequence
  Description of Artificial Sequence: Synthetic peptide
HLKTAVQM

SEQ ID NO: 20052 - protein, 11 aa, Artificial Sequence
  Description of Artificial Sequence: Synthetic peptide
TQVDPGLADQL

SEQ ID NO: 20053 - protein, 9 aa, Artificial Sequence
  Description of Artificial Sequence: Synthetic peptide
AQTEEEVGF

SEQ ID NO: 20054 - protein, 9 aa, Artificial Sequence
  Description of Artificial Sequence: Synthetic peptide
QLTEVVQKI

SEQ ID NO: 20055 - protein, 9 aa, Artificial Sequence
  Description of Artificial Sequence: Synthetic peptide
GQGTVSSNF

SEQ ID NO: 20056 - protein, 10 aa, Artificial Sequence
  Description of Artificial Sequence: Synthetic peptide
RQLTEVVQKI

SEQ ID NO: 20057 - protein, 10 aa, Artificial Sequence
  Description of Artificial Sequence: Synthetic peptide
GTQGVGDPQI

SEQ ID NO: 20058 - protein, 9 aa, Artificial Sequence
  Description of Artificial Sequence: Synthetic peptide
QLAEVVQKI

SEQ ID NO: 20059 - protein, 10 aa, Artificial Sequence
  Description of Artificial Sequence: Synthetic peptide
HQDPIPGQPL

SEQ ID NO: 20060 - protein, 9 aa, Artificial Sequence
  Description of Artificial Sequence: Synthetic peptide
TQGVGDPQI

SEQ ID NO: 20061 - protein, 10 aa, Artificial Sequence
  Description of Artificial Sequence: Synthetic peptide
KQLTEAVQKI

SEQ ID NO: 20062 - protein, 10 aa, Artificial Sequence
  Description of Artificial Sequence: Synthetic peptide
KQLAEVVQKI

SEQ ID NO: 20063 - protein, 9 aa, Artificial Sequence
  Description of Artificial Sequence: Synthetic peptide
QLTEVVQKI

SEQ ID NO: 20064 - protein, 9 aa, Artificial Sequence
  Description of Artificial Sequence: Synthetic peptide
QLAEVVQKI

SEQ ID NO: 20065 - protein, 9 aa, Artificial Sequence
  Description of Artificial Sequence: Synthetic peptide
GAASIALTV

SEQ ID NO: 20066 - protein, 9 aa, Artificial Sequence
  Description of Artificial Sequence: Synthetic peptide
GAASITLTV

SEQ ID NO: 20067 - protein, 9 aa, Artificial Sequence
  Description of Artificial Sequence: Synthetic peptide
QLTEAVQKI

SEQ ID NO: 20068 - protein, 9 aa, Artificial Sequence
  Description of Artificial Sequence: Synthetic peptide
SQIYPGIKV

SEQ ID NO: 20069 - protein, 9 aa, Artificial Sequence
  Description of Artificial Sequence: Synthetic peptide
VQFNETVNI

SEQ ID NO: 20070 - protein, 9 aa, Artificial Sequence
  Description of Artificial Sequence: Synthetic peptide
GQVDCSPGI

SEQ ID NO: 20071 - protein, 9 aa, Artificial Sequence
  Description of Artificial Sequence: Synthetic peptide
VQLNQTVEI

SEQ ID NO: 20072 - protein, 9 aa, Artificial Sequence
  Description of Artificial Sequence: Synthetic peptide
GQAIYAPPI

SEQ ID NO: 20073 - protein, 9 aa, Artificial Sequence
  Description of Artificial Sequence: Synthetic peptide
AVLAIVNRV

SEQ ID NO: 20074 - protein, 9 aa, Artificial Sequence
  Description of Artificial Sequence: Synthetic peptide
ASITLTVQV

SEQ ID NO: 20075 - protein, 9 aa, Artificial Sequence
  Description of Artificial Sequence: Synthetic peptide
VQKIALESI

SEQ ID NO: 20076 - protein, 8 aa, Artificial Sequence
  Description of Artificial Sequence: Synthetic peptide
SQVTNTNI

SEQ ID NO: 20077 - protein, 9 aa, Artificial Sequence
  Description of Artificial Sequence: Synthetic peptide
QQHLLKLTV

SEQ ID NO: 20078 - protein, 9 aa, Artificial Sequence
  Description of Artificial Sequence: Synthetic peptide
AVFAIVNRV

SEQ ID NO: 20079 - protein, 9 aa, Artificial Sequence
  Description of Artificial Sequence: Synthetic peptide
VLAEAMSQV

SEQ ID NO: 20080 - protein, 10 aa, Artificial Sequence
  Description of Artificial Sequence: Synthetic peptide
KQLTEAVQKI

SEQ ID NO: 20081 - protein, 9 aa, Artificial Sequence
  Description of Artificial Sequence: Synthetic peptide
RIIEIVQGI

SEQ ID NO: 20082 - protein, 8 aa, Artificial Sequence
  Description of Artificial Sequence: Synthetic peptide
YQTGTEEI

SEQ ID NO: 20083 - protein, 9 aa, Artificial Sequence
  Description of Artificial Sequence: Synthetic peptide
VQLNKTVEI

SEQ ID NO: 20084 - protein, 10 aa, Artificial Sequence
  Description of Artificial Sequence: Synthetic peptide
KVVEIEPLGV

SEQ ID NO: 20085 - protein, 10 aa, Artificial Sequence
  Description of Artificial Sequence: Synthetic peptide
RQLTEVVQKI

SEQ ID NO: 20086 - protein, 9 aa, Artificial Sequence
  Description of Artificial Sequence: Synthetic peptide
SQVSQNYPI

SEQ ID NO: 20087 - protein, 8 aa, Artificial Sequence
  Description of Artificial Sequence: Synthetic peptide
LQTGTQEI

SEQ ID NO: 20088 - protein, 9 aa, Artificial Sequence
  Description of Artificial Sequence: Synthetic peptide
VQKIALEAI

SEQ ID NO: 20089 - protein, 10 aa, Artificial Sequence
  Description of Artificial Sequence: Synthetic peptide
KQLAEVVQKI

SEQ ID NO: 20090 - protein, 9 aa, Artificial Sequence
  Description of Artificial Sequence: Synthetic peptide
NQKTELQAI

SEQ ID NO: 20091 - protein, 9 aa, Artificial Sequence
  Description of Artificial Sequence: Synthetic peptide
ALQTGTQEI

SEQ ID NO: 20092 - protein, 10 aa, Artificial Sequence
  Description of Artificial Sequence: Synthetic peptide
RQYNEVPIEI

SEQ ID NO: 20093 - protein, 9 aa, Artificial Sequence
  Description of Artificial Sequence: Synthetic peptide
GSNFTSATV

SEQ ID NO: 20094 - protein, 9 aa, Artificial Sequence
  Description of Artificial Sequence: Synthetic peptide
DRYALNPGL

SEQ ID NO: 20095 - protein, 9 aa, Artificial Sequence
  Description of Artificial Sequence: Synthetic peptide
DRFALNPGL

SEQ ID NO: 20096 - protein, 9 aa, Artificial Sequence
  Description of Artificial Sequence: Synthetic peptide
NRVLGTVAA

SEQ ID NO: 20097 - protein, 9 aa, Artificial Sequence
  Description of Artificial Sequence: Synthetic peptide
ERYLKDQQL

SEQ ID NO: 20098 - protein, 8 aa, Artificial Sequence
  Description of Artificial Sequence: Synthetic peptide
ERIPSSCL

SEQ ID NO: 20099 - protein, 9 aa, Artificial Sequence
  Description of Artificial Sequence: Synthetic peptide
ERYLKDQQL

SEQ ID NO: 20100 - protein, 8 aa, Artificial Sequence
  Description of Artificial Sequence: Synthetic peptide
GELVHQAL

SEQ ID NO: 20101 - protein, 8 aa, Artificial Sequence
  Description of Artificial Sequence: Synthetic peptide
GQPVHQAL

SEQ ID NO: 20102 - protein, 8 aa, Artificial Sequence
  Description of Artificial Sequence: Synthetic peptide
DLATHGAI

SEQ ID NO: 20103 - protein, 9 aa, Artificial Sequence
  Description of Artificial Sequence: Synthetic peptide
DRYALNPGL

SEQ ID NO: 20104 - protein, 9 aa, Artificial Sequence
  Description of Artificial Sequence: Synthetic peptide
VPLTREAEL

SEQ ID NO: 20105 - protein, 8 aa, Artificial Sequence
  Description of Artificial Sequence: Synthetic peptide
DLAKHGAI

SEQ ID NO: 20106 - protein, 9 aa, Artificial Sequence
  Description of Artificial Sequence: Synthetic peptide
DRFALNPGL

SEQ ID NO: 20107 - protein, 9 aa, Artificial Sequence
  Description of Artificial Sequence: Synthetic peptide
DPNPREITM

SEQ ID NO: 20108 - protein, 8 aa, Artificial Sequence
  Description of Artificial Sequence: Synthetic peptide
IQKLVGKL

SEQ ID NO: 20109 - protein, 9 aa, Artificial Sequence
  Description of Artificial Sequence: Synthetic peptide
TEAVQKIAL

SEQ ID NO: 20110 - protein, 9 aa, Artificial Sequence
  Description of Artificial Sequence: Synthetic peptide
LQKGLGISY

SEQ ID NO: 20111 - protein, 9 aa, Artificial Sequence
  Description of Artificial Sequence: Synthetic peptide
IIANVTENF

SEQ ID NO: 20112 - protein, 8 aa, Artificial Sequence
  Description of Artificial Sequence: Synthetic peptide
GQYIYSTY

SEQ ID NO: 20113 - protein, 8 aa, Artificial Sequence
  Description of Artificial Sequence: Synthetic peptide
GQHIYNTY

SEQ ID NO: 20114 - protein, 9 aa, Artificial Sequence
  Description of Artificial Sequence: Synthetic peptide
GTQEIKSLY

SEQ ID NO: 20115 - protein, 9 aa, Artificial Sequence
  Description of Artificial Sequence: Synthetic peptide
GQGTVSSNF

SEQ ID NO: 20116 - protein, 10 aa, Artificial Sequence
  Description of Artificial Sequence: Synthetic peptide
GCAELVVTTY

SEQ ID NO: 20117 - protein, 9 aa, Artificial Sequence
  Description of Artificial Sequence: Synthetic peptide
KQITKIQNF

SEQ ID NO: 20118 - protein, 9 aa, Artificial Sequence
  Description of Artificial Sequence: Synthetic peptide
HMGPGQVLY

SEQ ID NO: 20119 - protein, 9 aa, Artificial Sequence
  Description of Artificial Sequence: Synthetic peptide
SQVTNTNIM

SEQ ID NO: 20120 - protein, 10 aa, Artificial Sequence
  Description of Artificial Sequence: Synthetic peptide
VSIDNSNSSY

SEQ ID NO: 20121 - protein, 9 aa, Artificial Sequence
  Description of Artificial Sequence: Synthetic peptide
TVLDVGDAY

SEQ ID NO: 20122 - protein, 10 aa, Artificial Sequence
  Description of Artificial Sequence: Synthetic peptide
ILKEPVHGVY

SEQ ID NO: 20123 - protein, 8 aa, Artificial Sequence
  Description of Artificial Sequence: Synthetic peptide
AILVITTY

SEQ ID NO: 20124 - protein, 10 aa, Artificial Sequence
  Description of Artificial Sequence: Synthetic peptide
FLQKGLGISY

SEQ ID NO: 20125 - protein, 8 aa, Artificial Sequence
  Description of Artificial Sequence: Synthetic peptide
AVHIASGY

SEQ ID NO: 20126 - protein, 9 aa, Artificial Sequence
  Description of Artificial Sequence: Synthetic peptide
KQIIKIQNF

SEQ ID NO: 20127 - protein, 9 aa, Artificial Sequence
  Description of Artificial Sequence: Synthetic peptide
LQIAAIVAF

SEQ ID NO: 20128 - protein, 8 aa, Artificial Sequence
  Description of Artificial Sequence: Synthetic peptide
AVHVASGY

SEQ ID NO: 20129 - protein, 9 aa, Artificial Sequence
  Description of Artificial Sequence: Synthetic peptide
AQTEEEVGF

SEQ ID NO: 20130 - protein, 8 aa, Artificial Sequence
  Description of Artificial Sequence: Synthetic peptide
AELVVTTY

SEQ ID NO: 20131 - protein, 9 aa, Artificial Sequence
  Description of Artificial Sequence: Synthetic peptide
ILVQLQPSY

SEQ ID NO: 20132 - protein, 9 aa, Artificial Sequence
  Description of Artificial Sequence: Synthetic peptide
AIVGMGAVF

SEQ ID NO: 20133 - protein, 9 aa, Artificial Sequence
  Description of Artificial Sequence: Synthetic peptide
FLGTAGSTM

SEQ ID NO: 20134 - protein, 9 aa, Artificial Sequence
  Description of Artificial Sequence: Synthetic peptide
EAILVITTY

SEQ ID NO: 20135 - protein, 10 aa, Artificial Sequence
  Description of Artificial Sequence: Synthetic peptide
GQIVSPRCDY

SEQ ID NO: 20136 - protein, 9 aa, Artificial Sequence
  Description of Artificial Sequence: Synthetic peptide
WQKVGQAIY

SEQ ID NO: 20137 - protein, 10 aa, Artificial Sequence
  Description of Artificial Sequence: Synthetic peptide
IQWEREINNY

SEQ ID NO: 20138 - protein, 9 aa, Artificial Sequence
  Description of Artificial Sequence: Synthetic peptide
HMGPGQVLF

SEQ ID NO: 20139 - protein, 8 aa, Artificial Sequence
  Description of Artificial Sequence: Synthetic peptide
KTVEIVCY

SEQ ID NO: 20140 - protein, 10 aa, Artificial Sequence
  Description of Artificial Sequence: Synthetic peptide
GFLGTAGSTM

SEQ ID NO: 20141 - protein, 9 aa, Artificial Sequence
  Description of Artificial Sequence: Synthetic peptide
VVGDIRRAY

SEQ ID NO: 20142 - protein, 9 aa, Artificial Sequence
  Description of Artificial Sequence: Synthetic peptide
EAILVITTY

SEQ ID NO: 20143 - protein, 9 aa, Artificial Sequence
  Description of Artificial Sequence: Synthetic peptide
TVLDVGDAY

SEQ ID NO: 20144 - protein, 9 aa, Artificial Sequence
  Description of Artificial Sequence: Synthetic peptide
FLGTAGSTM

SEQ ID NO: 20145 - protein, 9 aa, Artificial Sequence
  Description of Artificial Sequence: Synthetic peptide
LQKGLGISY

SEQ ID NO: 20146 - protein, 9 aa, Artificial Sequence
  Description of Artificial Sequence: Synthetic peptide
HMGPGQVLY

SEQ ID NO: 20147 - protein, 10 aa, Artificial Sequence
  Description of Artificial Sequence: Synthetic peptide
FLQKGLGISY

SEQ ID NO: 20148 - protein, 9 aa, Artificial Sequence
  Description of Artificial Sequence: Synthetic peptide
TVGGHQAAM

SEQ ID NO: 20149 - protein, 9 aa, Artificial Sequence
  Description of Artificial Sequence: Synthetic peptide
SQVTNTNIM

SEQ ID NO: 20150 - protein, 9 aa, Artificial Sequence
  Description of Artificial Sequence: Synthetic peptide
TIGGHQAAM

SEQ ID NO: 20151 - protein, 9 aa, Artificial Sequence
  Description of Artificial Sequence: Synthetic peptide
QPIPVGEIY

SEQ ID NO: 20152 - protein, 9 aa, Artificial Sequence
  Description of Artificial Sequence: Synthetic peptide
IIANVTENF

SEQ ID NO: 20153 - protein, 9 aa, Artificial Sequence
  Description of Artificial Sequence: Synthetic peptide
ILVQLQPSY

SEQ ID NO: 20154 - protein, 8 aa, Artificial Sequence
  Description of Artificial Sequence: Synthetic peptide
GQYIYSTY

SEQ ID NO: 20155 - protein, 10 aa, Artificial Sequence
  Description of Artificial Sequence: Synthetic peptide
EINNYTGIIY

SEQ ID NO: 20156 - protein, 8 aa, Artificial Sequence
  Description of Artificial Sequence: Synthetic peptide
DNYTRIIY

SEQ ID NO: 20157 - protein, 9 aa, Artificial Sequence
  Description of Artificial Sequence: Synthetic peptide
DAYFSVPLY

SEQ ID NO: 20158 - protein, 9 aa, Artificial Sequence
  Description of Artificial Sequence: Synthetic peptide
SAEPVPLQL

SEQ ID NO: 20159 - protein, 9 aa, Artificial Sequence
  Description of Artificial Sequence: Synthetic peptide
DIAGTTSTL

SEQ ID NO: 20160 - protein, 8 aa, Artificial Sequence
  Description of Artificial Sequence: Synthetic peptide
DQLIHMCY

SEQ ID NO: 20161 - protein, 9 aa, Artificial Sequence
  Description of Artificial Sequence: Synthetic peptide
DIEIVTHSF

SEQ ID NO: 20162 - protein, 10 aa, Artificial Sequence
  Description of Artificial Sequence: Synthetic peptide
NTIGGHQAAM

SEQ ID NO: 20163 - protein, 10 aa, Artificial Sequence
  Description of Artificial Sequence: Synthetic peptide
DLWVHNTQGY

SEQ ID NO: 20164 - protein, 9 aa, Artificial Sequence
  Description of Artificial Sequence: Synthetic peptide
IPIGPGQVL

SEQ ID NO: 20165 - protein, 10 aa, Artificial Sequence
  Description of Artificial Sequence: Synthetic peptide
EVNIVTDSQY

SEQ ID NO: 20166 - protein, 9 aa, Artificial Sequence
  Description of Artificial Sequence: Synthetic peptide
AKNPEVVIY

SEQ ID NO: 20167 - protein, 9 aa, Artificial Sequence
  Description of Artificial Sequence: Synthetic peptide
LQKGLGISY

SEQ ID NO: 20168 - protein, 8 aa, Artificial Sequence
  Description of Artificial Sequence: Synthetic peptide
GQYIYSTY

SEQ ID NO: 20169 - protein, 9 aa, Artificial Sequence
  Description of Artificial Sequence: Synthetic peptide
QKTELQAIY

SEQ ID NO: 20170 - protein, 9 aa, Artificial Sequence
  Description of Artificial Sequence: Synthetic peptide
NKTVEIVCY

SEQ ID NO: 20171 - protein, 9 aa, Artificial Sequence
  Description of Artificial Sequence: Synthetic peptide
SKIGPENPY

SEQ ID NO: 20172 - protein, 9 aa, Artificial Sequence
  Description of Artificial Sequence: Synthetic peptide
KKYNSQVSH

SEQ ID NO: 20173 - protein, 8 aa, Artificial Sequence
  Description of Artificial Sequence: Synthetic peptide
QKGLGISY

SEQ ID NO: 20174 - protein, 9 aa, Artificial Sequence
  Description of Artificial Sequence: Synthetic peptide
GKKAIGTVL

SEQ ID NO: 20175 - protein, 8 aa, Artificial Sequence
  Description of Artificial Sequence: Synthetic peptide
GQHIYNTY

SEQ ID NO: 20176 - protein, 8 aa, Artificial Sequence
  Description of Artificial Sequence: Synthetic peptide
AKNILVQF

SEQ ID NO: 20177 - protein, 9 aa, Artificial Sequence
  Description of Artificial Sequence: Synthetic peptide
QKTELHAIY

SEQ ID NO: 20178 - protein, 9 aa, Artificial Sequence
  Description of Artificial Sequence: Synthetic peptide
VKVIEEKAF

SEQ ID NO: 20179 - protein, 9 aa, Artificial Sequence
  Description of Artificial Sequence: Synthetic peptide
KQITKIQNF

SEQ ID NO: 20180 - protein, 9 aa, Artificial Sequence
  Description of Artificial Sequence: Synthetic peptide
IHMGPGQVL

SEQ ID NO: 20181 - protein, 9 aa, Artificial Sequence
  Description of Artificial Sequence: Synthetic peptide
THLEGKVIL

SEQ ID NO: 20182 - protein, 9 aa, Artificial Sequence
  Description of Artificial Sequence: Synthetic peptide
AHTNDVRQL

SEQ ID NO: 20183 - protein, 9 aa, Artificial Sequence
  Description of Artificial Sequence: Synthetic peptide
VHIPLGEAI

SEQ ID NO: 20184 - protein, 9 aa, Artificial Sequence
  Description of Artificial Sequence: Synthetic peptide
EHLKTAVQM

SEQ ID NO: 20185 - protein, 11 aa, Artificial Sequence
  Description of Artificial Sequence: Synthetic peptide
THQDPIPGQPL

SEQ ID NO: 20186 - protein, 9 aa, Artificial Sequence
  Description of Artificial Sequence: Synthetic peptide
THLEGKIIL

SEQ ID NO: 20187 - protein, 9 aa, Artificial Sequence
  Description of Artificial Sequence: Synthetic peptide
FQQGEAREL

SEQ ID NO: 20188 - protein, 9 aa, Artificial Sequence
  Description of Artificial Sequence: Synthetic peptide
HQALSPRTL

SEQ ID NO: 20189 - protein, 9 aa, Artificial Sequence
  Description of Artificial Sequence: Synthetic peptide
GHQAAMQML

SEQ ID NO: 20190 - protein, 9 aa, Artificial Sequence
  Description of Artificial Sequence: Synthetic peptide
EHFNKTINF

SEQ ID NO: 20191 - protein, 9 aa, Artificial Sequence
  Description of Artificial Sequence: Synthetic peptide
AHTNDVKQL

SEQ ID NO: 20192 - protein, 8 aa, Artificial Sequence
  Description of Artificial Sequence: Synthetic peptide
LHKVAEEL

SEQ ID NO: 20193 - protein, 9 aa, Artificial Sequence
  Description of Artificial Sequence: Synthetic peptide
SQVTNTNIM

SEQ ID NO: 20194 - protein, 9 aa, Artificial Sequence
  Description of Artificial Sequence: Synthetic peptide
YHMNVSKKA

SEQ ID NO: 20195 - protein, 9 aa, Artificial Sequence
  Description of Artificial Sequence: Synthetic peptide
YQLEKEPIM

SEQ ID NO: 20196 - protein, 9 aa, Artificial Sequence
  Description of Artificial Sequence: Synthetic peptide
IPIGPGQVL

SEQ ID NO: 20197 - protein, 9 aa, Artificial Sequence
  Description of Artificial Sequence: Synthetic peptide
FQQREAREL

SEQ ID NO: 20198 - protein, 9 aa, Artificial Sequence
  Description of Artificial Sequence: Synthetic peptide
SQIYPGIKV

SEQ ID NO: 20199 - protein, 8 aa, Artificial Sequence
  Description of Artificial Sequence: Synthetic peptide
THLEGKVI

SEQ ID NO: 20200 - protein, 9 aa, Artificial Sequence
  Description of Artificial Sequence: Synthetic peptide
NHPKVSSEV

SEQ ID NO: 20201 - protein, 9 aa, Artificial Sequence
  Description of Artificial Sequence: Synthetic peptide
TVMETQRSW

SEQ ID NO: 20202 - protein, 9 aa, Artificial Sequence
  Description of Artificial Sequence: Synthetic peptide
TVLDVGDAY

SEQ ID NO: 20203 - protein, 9 aa, Artificial Sequence
  Description of Artificial Sequence: Synthetic peptide
TINEEAAEW

SEQ ID NO: 20204 - protein, 9 aa, Artificial Sequence
  Description of Artificial Sequence: Synthetic peptide
EAILVITTY

SEQ ID NO: 20205 - protein, 9 aa, Artificial Sequence
  Description of Artificial Sequence: Synthetic peptide
IIANVTENF

SEQ ID NO: 20206 - protein, 9 aa, Artificial Sequence
  Description of Artificial Sequence: Synthetic peptide
NETVNITCF

SEQ ID NO: 20207 - protein, 8 aa, Artificial Sequence
  Description of Artificial Sequence: Synthetic peptide
AELVVTTY

SEQ ID NO: 20208 - protein, 8 aa, Artificial Sequence
  Description of Artificial Sequence: Synthetic peptide
IEIVTHSF

SEQ ID NO: 20209 - protein, 9 aa, Artificial Sequence
  Description of Artificial Sequence: Synthetic peptide
DELEKLVEM

SEQ ID NO: 20210 - protein, 8 aa, Artificial Sequence
  Description of Artificial Sequence: Synthetic peptide
NESTTINF

SEQ ID NO: 20211 - protein, 8 aa, Artificial Sequence
  Description of Artificial Sequence: Synthetic peptide
NETPGIRY

SEQ ID NO: 20212 - protein, 8 aa, Artificial Sequence
  Description of Artificial Sequence: Synthetic peptide
LEIMTHTF

SEQ ID NO: 20213 - protein, 8 aa, Artificial Sequence
  Description of Artificial Sequence: Synthetic peptide
IEIMMHTF

SEQ ID NO: 20214 - protein, 8 aa, Artificial Sequence
  Description of Artificial Sequence: Synthetic peptide
TEEIKSLY

SEQ ID NO: 20215 - protein, 11 aa, Artificial Sequence
  Description of Artificial Sequence: Synthetic peptide
QEVNIVTDSQY

SEQ ID NO: 20216 - protein, 8 aa, Artificial Sequence
  Description of Artificial Sequence: Synthetic peptide
MENVTENF

SEQ ID NO: 20217 - protein, 11 aa, Artificial Sequence
  Description of Artificial Sequence: Synthetic peptide
LEVNIVTDSQY

SEQ ID NO: 20218 - protein, 8 aa, Artificial Sequence
  Description of Artificial Sequence: Synthetic peptide
DENSTVTI

SEQ ID NO: 20219 - protein, 8 aa, Artificial Sequence
  Description of Artificial Sequence: Synthetic peptide
PEVVIYQY

SEQ ID NO: 20220 - protein, 8 aa, Artificial Sequence
  Description of Artificial Sequence: Synthetic peptide
PEIVIYQY

SEQ ID NO: 20221 - protein, 8 aa, Artificial Sequence
  Description of Artificial Sequence: Synthetic peptide
DEQLLLAV

SEQ ID NO: 20222 - protein, 9 aa, Artificial Sequence
  Description of Artificial Sequence: Synthetic peptide
EELAKLVEM

SEQ ID NO: 20223 - protein, 9 aa, Artificial Sequence
  Description of Artificial Sequence: Synthetic peptide
TEAVQKIAL

SEQ ID NO: 20224 - protein, 9 aa, Artificial Sequence
  Description of Artificial Sequence: Synthetic peptide
DIEIVTHSF

SEQ ID NO: 20225 - protein, 9 aa, Artificial Sequence
  Description of Artificial Sequence: Synthetic peptide
ARVLAVERY

SEQ ID NO: 20226 - protein, 10 aa, Artificial Sequence
  Description of Artificial Sequence: Synthetic peptide
VRQGYSPLSF

SEQ ID NO: 20227 - protein, 9 aa, Artificial Sequence
  Description of Artificial Sequence: Synthetic peptide
ARILAVERY

SEQ ID NO: 20228 - protein, 10 aa, Artificial Sequence
  Description of Artificial Sequence: Synthetic peptide
NDILIEIEGK

SEQ ID NO: 20229 - protein, 10 aa, Artificial Sequence
  Description of Artificial Sequence: Synthetic peptide
GGLDGLIYSK

SEQ ID NO: 20230 - protein, 11 aa, Artificial Sequence
  Description of Artificial Sequence: Synthetic peptide
GIVQQQSNLLK

SEQ ID NO: 20231 - protein, 9 aa, Artificial Sequence
  Description of Artificial Sequence: Synthetic peptide
GRVNISEIM

SEQ ID NO: 20232 - protein, 10 aa, Artificial Sequence
  Description of Artificial Sequence: Synthetic peptide
GAVDLSFFLK

SEQ ID NO: 20233 - protein, 9 aa, Artificial Sequence
  Description of Artificial Sequence: Synthetic peptide
SRVGPENPY

SEQ ID NO: 20234 - protein, 10 aa, Artificial Sequence
  Description of Artificial Sequence: Synthetic peptide
GRVNISEIMK

SEQ ID NO: 20235 - protein, 9 aa, Artificial Sequence
  Description of Artificial Sequence: Synthetic peptide
GLDGLIYSK

SEQ ID NO: 20236 - protein, 10 aa, Artificial Sequence
  Description of Artificial Sequence: Synthetic peptide
TVLEDIDLPR

SEQ ID NO: 20237 - protein, 9 aa, Artificial Sequence
  Description of Artificial Sequence: Synthetic peptide
ARTVETLGR

SEQ ID NO: 20238 - protein, 11 aa, Artificial Sequence
  Description of Artificial Sequence: Synthetic peptide
TAIAVAEGTDR

SEQ ID NO: 20239 - protein, 10 aa, Artificial Sequence
  Description of Artificial Sequence: Synthetic peptide
VPVDPGEVER

SEQ ID NO: 20240 - protein, 11 aa, Artificial Sequence
  Description of Artificial Sequence: Synthetic peptide
QLLLNGSIAEK

SEQ ID NO: 20241 - protein, 11 aa, Artificial Sequence
  Description of Artificial Sequence: Synthetic peptide
KALTDIVPLTR

SEQ ID NO: 20242 - protein, 9 aa, Artificial Sequence
  Description of Artificial Sequence: Synthetic peptide
SRIGIIPQR

SEQ ID NO: 20243 - protein, 9 aa, Artificial Sequence
  Description of Artificial Sequence: Synthetic peptide
SRIGIMPQR

SEQ ID NO: 20244 - protein, 9 aa, Artificial Sequence
  Description of Artificial Sequence: Synthetic peptide
SRIGIIRQR

SEQ ID NO: 20245 - protein, 10 aa, Artificial Sequence
  Description of Artificial Sequence: Synthetic peptide
GRVNISEIMK

SEQ ID NO: 20246 - protein, 9 aa, Artificial Sequence
  Description of Artificial Sequence: Synthetic peptide
QRIEIKDTM

SEQ ID NO: 20247 - protein, 9 aa, Artificial Sequence
  Description of Artificial Sequence: Synthetic peptide
ARVLAVERY

SEQ ID NO: 20248 - protein, 9 aa, Artificial Sequence
  Description of Artificial Sequence: Synthetic peptide
ARTVGTLGL

SEQ ID NO: 20249 - protein, 9 aa, Artificial Sequence
  Description of Artificial Sequence: Synthetic peptide
GRVNISEIM

SEQ ID NO: 20250 - protein, 9 aa, Artificial Sequence
  Description of Artificial Sequence: Synthetic peptide
ARILAVERY

SEQ ID NO: 20251 - protein, 9 aa, Artificial Sequence
  Description of Artificial Sequence: Synthetic peptide
YRTQVDPGL

SEQ ID NO: 20252 - protein, 9 aa, Artificial Sequence
  Description of Artificial Sequence: Synthetic peptide
ARTVETLGR

SEQ ID NO: 20253 - protein, 9 aa, Artificial Sequence
  Description of Artificial Sequence: Synthetic peptide
SRVGPENPY

SEQ ID NO: 20254 - protein, 9 aa, Artificial Sequence
  Description of Artificial Sequence: Synthetic peptide
HRIDIRDTK

SEQ ID NO: 20255 - protein, 9 aa, Artificial Sequence
  Description of Artificial Sequence: Synthetic peptide
EAILVITTY

SEQ ID NO: 20256 - protein, 9 aa, Artificial Sequence
  Description of Artificial Sequence: Synthetic peptide
QPIPVGEIY

SEQ ID NO: 20257 - protein, 11 aa, Artificial Sequence
  Description of Artificial Sequence: Synthetic peptide
IPAETGQETAF

SEQ ID NO: 20258 - protein, 9 aa, Artificial Sequence
  Description of Artificial Sequence: Synthetic peptide
NPEVVIYQY

SEQ ID NO: 20259 - protein, 10 aa, Artificial Sequence
  Description of Artificial Sequence: Synthetic peptide
IPIGPGQVLY

SEQ ID NO: 20260 - protein, 9 aa, Artificial Sequence
  Description of Artificial Sequence: Synthetic peptide
NPEIVIYQY

SEQ ID NO: 20261 - protein, 9 aa, Artificial Sequence
  Description of Artificial Sequence: Synthetic peptide
EPIMGAETF

SEQ ID NO: 20262 - protein, 11 aa, Artificial Sequence
  Description of Artificial Sequence: Synthetic peptide
IPAETGQEAAF

SEQ ID NO: 20263 - protein, 11 aa, Artificial Sequence
  Description of Artificial Sequence: Synthetic peptide
VPISGRPNDSY

SEQ ID NO: 20264 - protein, 9 aa, Artificial Sequence
  Description of Artificial Sequence: Synthetic peptide
IPIGPGQVL

SEQ ID NO: 20265 - protein, 9 aa, Artificial Sequence
  Description of Artificial Sequence: Synthetic peptide
TVLDVGDAY

SEQ ID NO: 20266 - protein, 8 aa, Artificial Sequence
  Description of Artificial Sequence: Synthetic peptide
TPGPGIRY

SEQ ID NO: 20267 - protein, 9 aa, Artificial Sequence
  Description of Artificial Sequence: Synthetic peptide
DPNPREITM

SEQ ID NO: 20268 - protein, 9 aa, Artificial Sequence
  Description of Artificial Sequence: Synthetic peptide
PPIPVGEIY

SEQ ID NO: 20269 - protein, 9 aa, Artificial Sequence
  Description of Artificial Sequence: Synthetic peptide
NATAIAVAA

SEQ ID NO: 20270 - protein, 10 aa, Artificial Sequence
  Description of Artificial Sequence: Synthetic peptide
VPIDSNNKNY

SEQ ID NO: 20271 - protein, 9 aa, Artificial Sequence
  Description of Artificial Sequence: Synthetic peptide
CAELVVTTY

SEQ ID NO: 20272 - protein, 10 aa, Artificial Sequence
  Description of Artificial Sequence: Synthetic peptide
NPPIPVGEIY

SEQ ID NO: 20273 - protein, 9 aa, Artificial Sequence
  Description of Artificial Sequence: Synthetic peptide
DAYFSVPLY

SEQ ID NO: 20274 - protein, 11 aa, Artificial Sequence
  Description of Artificial Sequence: Synthetic peptide
IPLQIAAIVAF

SEQ ID NO: 20275 - protein, 8 aa, Artificial Sequence
  Description of Artificial Sequence: Synthetic peptide
LPNVTENF

SEQ ID NO: 20276 - protein, 9 aa, Artificial Sequence
  Description of Artificial Sequence: Synthetic peptide
MWTIVYIEY

SEQ ID NO: 20277 - protein, 9 aa, Artificial Sequence
  Description of Artificial Sequence: Synthetic peptide
IIANVTENF

SEQ ID NO: 20278 - protein, 9 aa, Artificial Sequence
  Description of Artificial Sequence: Synthetic peptide
SAEPVPLQL

SEQ ID NO: 20279 - protein, 9 aa, Artificial Sequence
  Description of Artificial Sequence: Synthetic peptide
FPISPIETV

SEQ ID NO: 20280 - protein, 9 aa, Artificial Sequence
  Description of Artificial Sequence: Synthetic peptide
DPNPREITM

SEQ ID NO: 20281 - protein, 9 aa, Artificial Sequence
  Description of Artificial Sequence: Synthetic peptide
QPDKSESEL

SEQ ID NO: 20282 - protein, 11 aa, Artificial Sequence
  Description of Artificial Sequence: Synthetic peptide
IPAETGQETAF

SEQ ID NO: 20283 - protein, 9 aa, Artificial Sequence
  Description of Artificial Sequence: Synthetic peptide
SAEPVPLQL

SEQ ID NO: 20284 - protein, 9 aa, Artificial Sequence
  Description of Artificial Sequence: Synthetic peptide
IPIGPGQVL

SEQ ID NO: 20285 - protein, 9 aa, Artificial Sequence
  Description of Artificial Sequence: Synthetic peptide
LAEGGEQIL

SEQ ID NO: 20286 - protein, 11 aa, Artificial Sequence
  Description of Artificial Sequence: Synthetic peptide
IPAETGQEAAF

SEQ ID NO: 20287 - protein, 9 aa, Artificial Sequence
  Description of Artificial Sequence: Synthetic peptide
SIAEGDIII

SEQ ID NO: 20288 - protein, 9 aa, Artificial Sequence
  Description of Artificial Sequence: Synthetic peptide
VPLTREAEL

SEQ ID NO: 20289 - protein, 9 aa, Artificial Sequence
  Description of Artificial Sequence: Synthetic peptide
DPSPQEMNL

SEQ ID NO: 20290 - protein, 9 aa, Artificial Sequence
  Description of Artificial Sequence: Synthetic peptide
FPISPIETV

SEQ ID NO: 20291 - protein, 9 aa, Artificial Sequence
  Description of Artificial Sequence: Synthetic peptide
DPNPQEMII

SEQ ID NO: 20292 - protein, 9 aa, Artificial Sequence
  Description of Artificial Sequence: Synthetic peptide
IPIGPGQVL

SEQ ID NO: 20293 - protein, 9 aa, Artificial Sequence
  Description of Artificial Sequence: Synthetic peptide
DPNPREITM

SEQ ID NO: 20294 - protein, 9 aa, Artificial Sequence
  Description of Artificial Sequence: Synthetic peptide
FPISPIETV

SEQ ID NO: 20295 - protein, 9 aa, Artificial Sequence
  Description of Artificial Sequence: Synthetic peptide
HPVHAGPVA

SEQ ID NO: 20296 - protein, 9 aa, Artificial Sequence
  Description of Artificial Sequence: Synthetic peptide
SAEPVPLQL

SEQ ID NO: 20297 - protein, 9 aa, Artificial Sequence
  Description of Artificial Sequence: Synthetic peptide
VPLTREAEL

SEQ ID NO: 20298 - protein, 9 aa, Artificial Sequence
  Description of Artificial Sequence: Synthetic peptide
YPSASLKSL

SEQ ID NO: 20299 - protein, 9 aa, Artificial Sequence
  Description of Artificial Sequence: Synthetic peptide
NATAIAVAA

SEQ ID NO: 20300 - protein, 9 aa, Artificial Sequence
  Description of Artificial Sequence: Synthetic peptide
FPVTPQVPL

SEQ ID NO: 20301 - protein, 11 aa, Artificial Sequence
  Description of Artificial Sequence: Synthetic peptide
IPAETGQETAF

SEQ ID NO: 20302 - protein, 9 aa, Artificial Sequence
  Description of Artificial Sequence: Synthetic peptide
TPQDLNTML

SEQ ID NO: 20303 - protein, 9 aa, Artificial Sequence
  Description of Artificial Sequence: Synthetic peptide
IVTDSQYAL

SEQ ID NO: 20304 - protein, 10 aa, Artificial Sequence
  Description of Artificial Sequence: Synthetic peptide
SPIETVPVKL

SEQ ID NO: 20305 - protein, 9 aa, Artificial Sequence
  Description of Artificial Sequence: Synthetic peptide
EPIMGAETF

SEQ ID NO: 20306 - protein, 9 aa, Artificial Sequence
  Description of Artificial Sequence: Synthetic peptide
SPSGGDIEI

SEQ ID NO: 20307 - protein, 10 aa, Artificial Sequence
  Description of Artificial Sequence: Synthetic peptide
VPTDPSPQEM

SEQ ID NO: 20308 - protein, 10 aa, Artificial Sequence
  Description of Artificial Sequence: Synthetic peptide
NANPDCKTIL

SEQ ID NO: 20309 - protein, 9 aa, Artificial Sequence
  Description of Artificial Sequence: Synthetic peptide
LAEGGEQIL

SEQ ID NO: 20310 - protein, 9 aa, Artificial Sequence
  Description of Artificial Sequence: Synthetic peptide
FPVKPQIPL

SEQ ID NO: 20311 - protein, 9 aa, Artificial Sequence
  Description of Artificial Sequence: Synthetic peptide
HPVHAGPIA

SEQ ID NO: 20312 - protein, 9 aa, Artificial Sequence
  Description of Artificial Sequence: Synthetic peptide
EALDKIEEL

SEQ ID NO: 20313 - protein, 11 aa, Artificial Sequence
  Description of Artificial Sequence: Synthetic peptide
IPAETGQEAAF

SEQ ID NO: 20314 - protein, 10 aa, Artificial Sequence
  Description of Artificial Sequence: Synthetic peptide
VPTDPNPQEM

SEQ ID NO: 20315 - protein, 9 aa, Artificial Sequence
  Description of Artificial Sequence: Synthetic peptide
QPDKSESEL

SEQ ID NO: 20316 - protein, 9 aa, Artificial Sequence
  Description of Artificial Sequence: Synthetic peptide
SPSGGDLEI

SEQ ID NO: 20317 - protein, 11 aa, Artificial Sequence
  Description of Artificial Sequence: Synthetic peptide
IPAETGQETAF

SEQ ID NO: 20318 - protein, 9 aa, Artificial Sequence
  Description of Artificial Sequence: Synthetic peptide
QPIPVGEIY

SEQ ID NO: 20319 - protein, 11 aa, Artificial Sequence
  Description of Artificial Sequence: Synthetic peptide
IPAETGQEAAF

SEQ ID NO: 20320 - protein, 9 aa, Artificial Sequence
  Description of Artificial Sequence: Synthetic peptide
DPNPREITM

SEQ ID NO: 20321 - protein, 11 aa, Artificial Sequence
  Description of Artificial Sequence: Synthetic peptide
VPISGRPNDSY

SEQ ID NO: 20322 - protein, 9 aa, Artificial Sequence
  Description of Artificial Sequence: Synthetic peptide
NPEVVIYQY

SEQ ID NO: 20323 - protein, 9 aa, Artificial Sequence
  Description of Artificial Sequence: Synthetic peptide
EAILVITTY

SEQ ID NO: 20324 - protein, 10 aa, Artificial Sequence
  Description of Artificial Sequence: Synthetic peptide
IPIGPGQVLY

SEQ ID NO: 20325 - protein, 9 aa, Artificial Sequence
  Description of Artificial Sequence: Synthetic peptide
EPIMGAETF

SEQ ID NO: 20326 - protein, 9 aa, Artificial Sequence
  Description of Artificial Sequence: Synthetic peptide
NPEIVIYQY

SEQ ID NO: 20327 - protein, 9 aa, Artificial Sequence
  Description of Artificial Sequence: Synthetic peptide
IPIGPGQVL

SEQ ID NO: 20328 - protein, 9 aa, Artificial Sequence
  Description of Artificial Sequence: Synthetic peptide
CAELVVTTY

SEQ ID NO: 20329 - protein, 9 aa, Artificial Sequence
  Description of Artificial Sequence: Synthetic peptide
TVLDVGDAY

SEQ ID NO: 20330 - protein, 10 aa, Artificial Sequence
  Description of Artificial Sequence: Synthetic peptide
NPPIPVGEIY

SEQ ID NO: 20331 - protein, 8 aa, Artificial Sequence
  Description of Artificial Sequence: Synthetic peptide
TPGPGIRY

SEQ ID NO: 20332 - protein, 9 aa, Artificial Sequence
  Description of Artificial Sequence: Synthetic peptide
DPNPREITM

SEQ ID NO: 20333 - protein, 9 aa, Artificial Sequence
  Description of Artificial Sequence: Synthetic peptide
QPDKSESEL

SEQ ID NO: 20334 - protein, 11 aa, Artificial Sequence
  Description of Artificial Sequence: Synthetic peptide
IPAETGQETAF

SEQ ID NO: 20335 - protein, 9 aa, Artificial Sequence
  Description of Artificial Sequence: Synthetic peptide
IPIGPGQVL

SEQ ID NO: 20336 - protein, 9 aa, Artificial Sequence
  Description of Artificial Sequence: Synthetic peptide
VPLTREAEL

SEQ ID NO: 20337 - protein, 9 aa, Artificial Sequence
  Description of Artificial Sequence: Synthetic peptide
SAEPVPLQL

SEQ ID NO: 20338 - protein, 11 aa, Artificial Sequence
  Description of Artificial Sequence: Synthetic peptide
IPAETGQEAAF

SEQ ID NO: 20339 - protein, 9 aa, Artificial Sequence
  Description of Artificial Sequence: Synthetic peptide
LAEGGEQIL

SEQ ID NO: 20340 - protein, 9 aa, Artificial Sequence
  Description of Artificial Sequence: Synthetic peptide
DPSPQEMNL

SEQ ID NO: 20341 - protein, 9 aa, Artificial Sequence
  Description of Artificial Sequence: Synthetic peptide
FPISPIETV

SEQ ID NO: 20342 - protein, 9 aa, Artificial Sequence
  Description of Artificial Sequence: Synthetic peptide
SPSGGDIEI

SEQ ID NO: 20343 - protein, 9 aa, Artificial Sequence
  Description of Artificial Sequence: Synthetic peptide
HPVHAGPVA

SEQ ID NO: 20344 - protein, 9 aa, Artificial Sequence
  Description of Artificial Sequence: Synthetic peptide
MGELVHQAL

SEQ ID NO: 20345 - protein, 8 aa, Artificial Sequence
  Description of Artificial Sequence: Synthetic peptide
NESTTINF

SEQ ID NO: 20346 - protein, 8 aa, Artificial Sequence
  Description of Artificial Sequence: Synthetic peptide
IEIVTHSF

SEQ ID NO: 20347 - protein, 9 aa, Artificial Sequence
  Description of Artificial Sequence: Synthetic peptide
AEWDRVHPV

SEQ ID NO: 20348 - protein, 8 aa, Artificial Sequence
  Description of Artificial Sequence: Synthetic peptide
MENVTENF

SEQ ID NO: 20349 - protein, 8 aa, Artificial Sequence
  Description of Artificial Sequence: Synthetic peptide
GELVHQAL

SEQ ID NO: 20350 - protein, 8 aa, Artificial Sequence
  Description of Artificial Sequence: Synthetic peptide
KDAKTTLF

SEQ ID NO: 20351 - protein, 8 aa, Artificial Sequence
  Description of Artificial Sequence: Synthetic peptide
AEHLKTAV

SEQ ID NO: 20352 - protein, 9 aa, Artificial Sequence
  Description of Artificial Sequence: Synthetic peptide
AEVVQKIAL

SEQ ID NO: 20353 - protein, 9 aa, Artificial Sequence
  Description of Artificial Sequence: Synthetic peptide
KELYPSASL

SEQ ID NO: 20354 - protein, 8 aa, Artificial Sequence
  Description of Artificial Sequence: Synthetic peptide
SENGTETF

SEQ ID NO: 20355 - protein, 8 aa, Artificial Sequence
  Description of Artificial Sequence: Synthetic peptide
AEEIKSLF

SEQ ID NO: 20356 - protein, 8 aa, Artificial Sequence
  Description of Artificial Sequence: Synthetic peptide
YDSNHPKV

SEQ ID NO: 20357 - protein, 9 aa, Artificial Sequence
  Description of Artificial Sequence: Synthetic peptide
TEAVQKIAL

SEQ ID NO: 20358 - protein, 8 aa, Artificial Sequence
  Description of Artificial Sequence: Synthetic peptide
TDIQTREL

SEQ ID NO: 20359 - protein, 8 aa, Artificial Sequence
  Description of Artificial Sequence: Synthetic peptide
SDIQTKEL

SEQ ID NO: 20360 - protein, 9 aa, Artificial Sequence
  Description of Artificial Sequence: Synthetic peptide
IHMGPGQVL

SEQ ID NO: 20361 - protein, 9 aa, Artificial Sequence
  Description of Artificial Sequence: Synthetic peptide
EHFNKTINF

SEQ ID NO: 20362 - protein, 9 aa, Artificial Sequence
  Description of Artificial Sequence: Synthetic peptide
IHTDNGSNF

SEQ ID NO: 20363 - protein, 9 aa, Artificial Sequence
  Description of Artificial Sequence: Synthetic peptide
TQGVGDPQI

SEQ ID NO: 20364 - protein, 9 aa, Artificial Sequence
  Description of Artificial Sequence: Synthetic peptide
VHIPLGEAI

SEQ ID NO: 20365 - protein, 11 aa, Artificial Sequence
  Description of Artificial Sequence: Synthetic peptide
TQVDPGLADQL

SEQ ID NO: 20366 - protein, 9 aa, Artificial Sequence
  Description of Artificial Sequence: Synthetic peptide
THLEGKVIL

SEQ ID NO: 20367 - protein, 11 aa, Artificial Sequence
  Description of Artificial Sequence: Synthetic peptide
THQDPIPGQPL

SEQ ID NO: 20368 - protein, 10 aa, Artificial Sequence
  Description of Artificial Sequence: Synthetic peptide
HQDPIPGQPL

SEQ ID NO: 20369 - protein, 10 aa, Artificial Sequence
  Description of Artificial Sequence: Synthetic peptide
IHMGPGQVLF

SEQ ID NO: 20370 - protein, 9 aa, Artificial Sequence
  Description of Artificial Sequence: Synthetic peptide
TQDFWEVQL

SEQ ID NO: 20371 - protein, 9 aa, Artificial Sequence
  Description of Artificial Sequence: Synthetic peptide
YRTQVDPGL

SEQ ID NO: 20372 - protein, 9 aa, Artificial Sequence
  Description of Artificial Sequence: Synthetic peptide
SHDEIWNNM

SEQ ID NO: 20373 - protein, 9 aa, Artificial Sequence
  Description of Artificial Sequence: Synthetic peptide
IIANVTENF

SEQ ID NO: 20374 - protein, 9 aa, Artificial Sequence
  Description of Artificial Sequence: Synthetic peptide
GHQAAMQML

SEQ ID NO: 20375 - protein, 10 aa, Artificial Sequence
  Description of Artificial Sequence: Synthetic peptide
LQDSGQEVNI

SEQ ID NO: 20376 - protein, 9 aa, Artificial Sequence
  Description of Artificial Sequence: Synthetic peptide
THLEGKIIL

SEQ ID NO: 20377 - protein, 9 aa, Artificial Sequence
  Description of Artificial Sequence: Synthetic peptide
AHTNDVKQL

SEQ ID NO: 20378 - protein, 9 aa, Artificial Sequence
  Description of Artificial Sequence: Synthetic peptide
EHLKTAVQM

SEQ ID NO: 20379 - protein, 9 aa, Artificial Sequence
  Description of Artificial Sequence: Synthetic peptide
AHTNDVRQL

SEQ ID NO: 20380 - protein, 10 aa, Artificial Sequence
  Description of Artificial Sequence: Synthetic peptide
NQIDSISERI

SEQ ID NO: 20381 - protein, 9 aa, Artificial Sequence
  Description of Artificial Sequence: Synthetic peptide
QDSGQEVNI

SEQ ID NO: 20382 - protein, 9 aa, Artificial Sequence
  Description of Artificial Sequence: Synthetic peptide
IHMGPGQVL

SEQ ID NO: 20383 - protein, 11 aa, Artificial Sequence
  Description of Artificial Sequence: Synthetic peptide
TQVDPGLADQL

SEQ ID NO: 20384 - protein, 9 aa, Artificial Sequence
  Description of Artificial Sequence: Synthetic peptide
YRTQVDPGL

SEQ ID NO: 20385 - protein, 11 aa, Artificial Sequence
  Description of Artificial Sequence: Synthetic peptide
THQDPIPGQPL

SEQ ID NO: 20386 - protein, 11 aa, Artificial Sequence
  Description of Artificial Sequence: Synthetic peptide
VHAGPVAPGQM

SEQ ID NO: 20387 - protein, 9 aa, Artificial Sequence
  Description of Artificial Sequence: Synthetic peptide
THLEGKVIL

SEQ ID NO: 20388 - protein, 9 aa, Artificial Sequence
  Description of Artificial Sequence: Synthetic peptide
EHLKTAVQM

SEQ ID NO: 20389 - protein, 9 aa, Artificial Sequence
  Description of Artificial Sequence: Synthetic peptide
SQVTNTNIM

SEQ ID NO: 20390 - protein, 10 aa, Artificial Sequence
  Description of Artificial Sequence: Synthetic peptide
HQDPIPGQPL

SEQ ID NO: 20391 - protein, 9 aa, Artificial Sequence
  Description of Artificial Sequence: Synthetic peptide
FQQGEAREL

SEQ ID NO: 20392 - protein, 9 aa, Artificial Sequence
  Description of Artificial Sequence: Synthetic peptide
IHTDNGSNF

SEQ ID NO: 20393 - protein, 9 aa, Artificial Sequence
  Description of Artificial Sequence: Synthetic peptide
NRVLGTVAA

SEQ ID NO: 20394 - protein, 9 aa, Artificial Sequence
  Description of Artificial Sequence: Synthetic peptide
EHFNKTINF

SEQ ID NO: 20395 - protein, 9 aa, Artificial Sequence
  Description of Artificial Sequence: Synthetic peptide
VHIPLGEAI

SEQ ID NO: 20396 - protein, 9 aa, Artificial Sequence
  Description of Artificial Sequence: Synthetic peptide
NRVLGTVAA

SEQ ID NO: 20397 - protein, 8 aa, Artificial Sequence
  Description of Artificial Sequence: Synthetic peptide
NRVLGTVA

SEQ ID NO: 20398 - protein, 9 aa, Artificial Sequence
  Description of Artificial Sequence: Synthetic peptide
NATAIAVAA

SEQ ID NO: 20399 - protein, 10 aa, Artificial Sequence
  Description of Artificial Sequence: Synthetic peptide
SQYALGIIQA

SEQ ID NO: 20400 - protein, 9 aa, Artificial Sequence
  Description of Artificial Sequence: Synthetic peptide
VQLGIPHPA

SEQ ID NO: 20401 - protein, 9 aa, Artificial Sequence
  Description of Artificial Sequence: Synthetic peptide
MRRAPAPAA

SEQ ID NO: 20402 - protein, 8 aa, Artificial Sequence
  Description of Artificial Sequence: Synthetic peptide
THGIKPVV

SEQ ID NO: 20403 - protein, 8 aa, Artificial Sequence
  Description of Artificial Sequence: Synthetic peptide
VHIPLGEA

SEQ ID NO: 20404 - protein, 8 aa, Artificial Sequence
  Description of Artificial Sequence: Synthetic peptide
WQRPLVTV

SEQ ID NO: 20405 - protein, 9 aa, Artificial Sequence
  Description of Artificial Sequence: Synthetic peptide
SHNISTNST

SEQ ID NO: 20406 - protein, 8 aa, Artificial Sequence
  Description of Artificial Sequence: Synthetic peptide
GKVILVAV

SEQ ID NO: 20407 - protein, 9 aa, Artificial Sequence
  Description of Artificial Sequence: Synthetic peptide
QRVGQAIYA

SEQ ID NO: 20408 - protein, 8 aa, Artificial Sequence
  Description of Artificial Sequence: Synthetic peptide
MHEDIISV

SEQ ID NO: 20409 - protein, 9 aa, Artificial Sequence
  Description of Artificial Sequence: Synthetic peptide
NHPKVSSEV

SEQ ID NO: 20410 - protein, 9 aa, Artificial Sequence
  Description of Artificial Sequence: Synthetic peptide
QRTGQAIYA

SEQ ID NO: 20411 - protein, 8 aa, Artificial Sequence
  Description of Artificial Sequence: Synthetic peptide
MHDDIISV

SEQ ID NO: 20412 - protein, 9 aa, Artificial Sequence
  Description of Artificial Sequence: Synthetic peptide
AEVVQKIAL

SEQ ID NO: 20413 - protein, 9 aa, Artificial Sequence
  Description of Artificial Sequence: Synthetic peptide
TEAVQKIAL

SEQ ID NO: 20414 - protein, 9 aa, Artificial Sequence
  Description of Artificial Sequence: Synthetic peptide
IEDEEREVL

SEQ ID NO: 20415 - protein, 10 aa, Artificial Sequence
  Description of Artificial Sequence: Synthetic peptide
IEIKDTMEAL

SEQ ID NO: 20416 - protein, 9 aa, Artificial Sequence
  Description of Artificial Sequence: Synthetic peptide
MEDEDREVL

SEQ ID NO: 20417 - protein, 9 aa, Artificial Sequence
  Description of Artificial Sequence: Synthetic peptide
QENNEKDLL

SEQ ID NO: 20418 - protein, 9 aa, Artificial Sequence
  Description of Artificial Sequence: Synthetic peptide
SEGATPQDL

SEQ ID NO: 20419 - protein, 8 aa, Artificial Sequence
  Description of Artificial Sequence: Synthetic peptide
IETVPVKL

SEQ ID NO: 20420 - protein, 10 aa, Artificial Sequence
  Description of Artificial Sequence: Synthetic peptide
QELKNSAISL

SEQ ID NO: 20421 - protein, 9 aa, Artificial Sequence
  Description of Artificial Sequence: Synthetic peptide
KELYPSASL

SEQ ID NO: 20422 - protein, 10 aa, Artificial Sequence
  Description of Artificial Sequence: Synthetic peptide
MEDEDREVLM

SEQ ID NO: 20423 - protein, 8 aa, Artificial Sequence
  Description of Artificial Sequence: Synthetic peptide
GELVHQAL

SEQ ID NO: 20424 - protein, 10 aa, Artificial Sequence
  Description of Artificial Sequence: Synthetic peptide
KEALDKIEEL

SEQ ID NO: 20425 - protein, 9 aa, Artificial Sequence
  Description of Artificial Sequence: Synthetic peptide
NETVNITCF

SEQ ID NO: 20426 - protein, 9 aa, Artificial Sequence
  Description of Artificial Sequence: Synthetic peptide
KELYPLTSL

SEQ ID NO: 20427 - protein, 9 aa, Artificial Sequence
  Description of Artificial Sequence: Synthetic peptide
QEKNEQDLL

SEQ ID NO: 20428 - protein, 9 aa, Artificial Sequence
  Description of Artificial Sequence: Synthetic peptide
QEKNEQELL

SEQ ID NO: 20429 - protein, 10 aa, Artificial Sequence
  Description of Artificial Sequence: Synthetic peptide
AEHLKTAVQM

SEQ ID NO: 20430 - protein, 8 aa, Artificial Sequence
  Description of Artificial Sequence: Synthetic peptide
IEAQQHLL

SEQ ID NO: 20431 - protein, 9 aa, Artificial Sequence
  Description of Artificial Sequence: Synthetic peptide
AEMEEEGKI

SEQ ID NO: 20432 - protein, 9 aa, Artificial Sequence
  Description of Artificial Sequence: Synthetic peptide
AEVVQKIAL

SEQ ID NO: 20433 - protein, 9 aa, Artificial Sequence
  Description of Artificial Sequence: Synthetic peptide
TEAVQKIAL

SEQ ID NO: 20434 - protein, 8 aa, Artificial Sequence
  Description of Artificial Sequence: Synthetic peptide
GELVHQAL

SEQ ID NO: 20435 - protein, 9 aa, Artificial Sequence
  Description of Artificial Sequence: Synthetic peptide
NETVNITCF

SEQ ID NO: 20436 - protein, 8 aa, Artificial Sequence
  Description of Artificial Sequence: Synthetic peptide
SDIQTKEL

SEQ ID NO: 20437 - protein, 9 aa, Artificial Sequence
  Description of Artificial Sequence: Synthetic peptide
TEVVQKISC

SEQ ID NO: 20438 - protein, 10 aa, Artificial Sequence
  Description of Artificial Sequence: Synthetic peptide
IEIKDTMEAL

SEQ ID NO: 20439 - protein, 8 aa, Artificial Sequence
  Description of Artificial Sequence: Synthetic peptide
TDIQTREL

SEQ ID NO: 20440 - protein, 10 aa, Artificial Sequence
  Description of Artificial Sequence: Synthetic peptide
AEHLKTAVQM

SEQ ID NO: 20441 - protein, 9 aa, Artificial Sequence
  Description of Artificial Sequence: Synthetic peptide
SERDWSNTL

SEQ ID NO: 20442 - protein, 8 aa, Artificial Sequence
  Description of Artificial Sequence: Synthetic peptide
IETVPVKL

SEQ ID NO: 20443 - protein, 10 aa, Artificial Sequence
  Description of Artificial Sequence: Synthetic peptide
QELKNSAISL

SEQ ID NO: 20444 - protein, 9 aa, Artificial Sequence
  Description of Artificial Sequence: Synthetic peptide
SEVHIPLGC

SEQ ID NO: 20445 - protein, 9 aa, Artificial Sequence
  Description of Artificial Sequence: Synthetic peptide
SEIMKNCSF

SEQ ID NO: 20446 - protein, 9 aa, Artificial Sequence
  Description of Artificial Sequence: Synthetic peptide
KELYPLTSL

SEQ ID NO: 20447 - protein, 10 aa, Artificial Sequence
  Description of Artificial Sequence: Synthetic peptide
GEIIGNIRET

SEQ ID NO: 20448 - protein, 9 aa, Artificial Sequence
  Description of Artificial Sequence: Synthetic peptide
AEWDRVHPV

SEQ ID NO: 20449 - protein, 9 aa, Artificial Sequence
  Description of Artificial Sequence: Synthetic peptide
IEDEEREVL

SEQ ID NO: 20450 - protein, 8 aa, Artificial Sequence
  Description of Artificial Sequence: Synthetic peptide
IEAQQHLL

SEQ ID NO: 20451 - protein, 9 aa, Artificial Sequence
  Description of Artificial Sequence: Synthetic peptide
SERIPSSCL

SEQ ID NO: 20452 - protein, 9 aa, Artificial Sequence
  Description of Artificial Sequence: Synthetic peptide
SDFNLPPVV

SEQ ID NO: 20453 - protein, 9 aa, Artificial Sequence
  Description of Artificial Sequence: Synthetic peptide
MEDEDREVL

SEQ ID NO: 20454 - protein, 9 aa, Artificial Sequence
  Description of Artificial Sequence: Synthetic peptide
KELYPSASL

SEQ ID NO: 20455 - protein, 9 aa, Artificial Sequence
  Description of Artificial Sequence: Synthetic peptide
SEGATPQDL

SEQ ID NO: 20456 - protein, 10 aa, Artificial Sequence
  Description of Artificial Sequence: Synthetic peptide
QEIKSLYNTV

SEQ ID NO: 20457 - protein, 9 aa, Artificial Sequence
  Description of Artificial Sequence: Synthetic peptide
SEAAIRKAI

SEQ ID NO: 20458 - protein, 8 aa, Artificial Sequence
  Description of Artificial Sequence: Synthetic peptide
GEQILVQI

SEQ ID NO: 20459 - protein, 9 aa, Artificial Sequence
  Description of Artificial Sequence: Synthetic peptide
SESELVNQI

SEQ ID NO: 20460 - protein, 8 aa, Artificial Sequence
  Description of Artificial Sequence: Synthetic peptide
AELVVTTY

SEQ ID NO: 20461 - protein, 9 aa, Artificial Sequence
  Description of Artificial Sequence: Synthetic peptide
KEVESKAEP

SEQ ID NO: 20462 - protein, 10 aa, Artificial Sequence
  Description of Artificial Sequence: Synthetic peptide
RELSPEQTRA

SEQ ID NO: 20463 - protein, 9 aa, Artificial Sequence
  Description of Artificial Sequence: Synthetic peptide
EEVGFPVTP

SEQ ID NO: 20464 - protein, 10 aa, Artificial Sequence
  Description of Artificial Sequence: Synthetic peptide
VEIEPLGVAP

SEQ ID NO: 20465 - protein, 9 aa, Artificial Sequence
  Description of Artificial Sequence: Synthetic peptide
EEVGFPVKP

SEQ ID NO: 20466 - protein, 9 aa, Artificial Sequence
  Description of Artificial Sequence: Synthetic peptide
GESGVLLGA

SEQ ID NO: 20467 - protein, 9 aa, Artificial Sequence
  Description of Artificial Sequence: Synthetic peptide
SEVHIPLGC

SEQ ID NO: 20468 - protein, 10 aa, Artificial Sequence
  Description of Artificial Sequence: Synthetic peptide
GEIIGNIRET

SEQ ID NO: 20469 - protein, 9 aa, Artificial Sequence
  Description of Artificial Sequence: Synthetic peptide
IEIKDTMEA

SEQ ID NO: 20470 - protein, 9 aa, Artificial Sequence
  Description of Artificial Sequence: Synthetic peptide
EEVGFPVRP

SEQ ID NO: 20471 - protein, 9 aa, Artificial Sequence
  Description of Artificial Sequence: Synthetic peptide
LEKEPIMGA

SEQ ID NO: 20472 - protein, 8 aa, Artificial Sequence
  Description of Artificial Sequence: Synthetic peptide
RDFVLIAA

SEQ ID NO: 20473 - protein, 9 aa, Artificial Sequence
  Description of Artificial Sequence: Synthetic peptide
VEIEPLGVA

SEQ ID NO: 20474 - protein, 10 aa, Artificial Sequence
  Description of Artificial Sequence: Synthetic peptide
SEVHIPLGEA

SEQ ID NO: 20475 - protein, 8 aa, Artificial Sequence
  Description of Artificial Sequence: Synthetic peptide
SEAAIRKA

SEQ ID NO: 20476 - protein, 9 aa, Artificial Sequence
  Description of Artificial Sequence: Synthetic peptide
QEFGIPYNP

SEQ ID NO: 20477 - protein, 9 aa, Artificial Sequence
  Description of Artificial Sequence: Synthetic peptide
AEWDRVHPV

SEQ ID NO: 20478 - protein, 10 aa, Artificial Sequence
  Description of Artificial Sequence: Synthetic peptide
SDFNLPPVVA

SEQ ID NO: 20479 - protein, 8 aa, Artificial Sequence
  Description of Artificial Sequence: Synthetic peptide
AEVVQKIA

SEQ ID NO: 20480 - protein, 9 aa, Artificial Sequence
  Description of Artificial Sequence: Synthetic peptide
AEVVQKIAL

SEQ ID NO: 20481 - protein, 9 aa, Artificial Sequence
  Description of Artificial Sequence: Synthetic peptide
TEAVQKIAL

SEQ ID NO: 20482 - protein, 8 aa, Artificial Sequence
  Description of Artificial Sequence: Synthetic peptide
GELVHQAL

SEQ ID NO: 20483 - protein, 9 aa, Artificial Sequence
  Description of Artificial Sequence: Synthetic peptide
SERIPSSCL

SEQ ID NO: 20484 - protein, 9 aa, Artificial Sequence
  Description of Artificial Sequence: Synthetic peptide
SERDWSNTL

SEQ ID NO: 20485 - protein, 8 aa, Artificial Sequence
  Description of Artificial Sequence: Synthetic peptide
SDIQTKEL

SEQ ID NO: 20486 - protein, 9 aa, Artificial Sequence
  Description of Artificial Sequence: Synthetic peptide
IEDEEREVL

SEQ ID NO: 20487 - protein, 8 aa, Artificial Sequence
  Description of Artificial Sequence: Synthetic peptide
AEVQKQGL

SEQ ID NO: 20488 - protein, 8 aa, Artificial Sequence
  Description of Artificial Sequence: Synthetic peptide
TDIQTREL

SEQ ID NO: 20489 - protein, 8 aa, Artificial Sequence
  Description of Artificial Sequence: Synthetic peptide
AEHLKTAV

SEQ ID NO: 20490 - protein, 9 aa, Artificial Sequence
  Description of Artificial Sequence: Synthetic peptide
MEDEDREVL

SEQ ID NO: 20491 - protein, 9 aa, Artificial Sequence
  Description of Artificial Sequence: Synthetic peptide
SEIMKNCSF

SEQ ID NO: 20492 - protein, 9 aa, Artificial Sequence
  Description of Artificial Sequence: Synthetic peptide
QEKNEQELL

SEQ ID NO: 20493 - protein, 9 aa, Artificial Sequence
  Description of Artificial Sequence: Synthetic peptide
SEAAIRKAI

SEQ ID NO: 20494 - protein, 8 aa, Artificial Sequence
  Description of Artificial Sequence: Synthetic peptide
IEAQQHLL

SEQ ID NO: 20495 - protein, 9 aa, Artificial Sequence
  Description of Artificial Sequence: Synthetic peptide
QEKNEQDLL

SEQ ID NO: 20496 - protein, 9 aa, Artificial Sequence
  Description of Artificial Sequence: Synthetic peptide
IEIEGKKAI

SEQ ID NO: 20497 - protein, 8 aa, Artificial Sequence
  Description of Artificial Sequence: Synthetic peptide
AEKLWVTV

SEQ ID NO: 20498 - protein, 9 aa, Artificial Sequence
  Description of Artificial Sequence: Synthetic peptide
GEQGRTRSI

SEQ ID NO: 20499 - protein, 9 aa, Artificial Sequence
  Description of Artificial Sequence: Synthetic peptide
SERILSACL

SEQ ID NO: 20500 - protein, 10 aa, Artificial Sequence
  Description of Artificial Sequence: Synthetic peptide
AEHLKTAVQM

SEQ ID NO: 20501 - protein, 9 aa, Artificial Sequence
  Description of Artificial Sequence: Synthetic peptide
TEVVQKISC

SEQ ID NO: 20502 - protein, 8 aa, Artificial Sequence
  Description of Artificial Sequence: Synthetic peptide
TERQANFL

SEQ ID NO: 20503 - protein, 9 aa, Artificial Sequence
  Description of Artificial Sequence: Synthetic peptide
KELYPLTSL

SEQ ID NO: 20504 - protein, 9 aa, Artificial Sequence
  Description of Artificial Sequence: Synthetic peptide
NETVNITCF

SEQ ID NO: 20505 - protein, 8 aa, Artificial Sequence
  Description of Artificial Sequence: Synthetic peptide
IEIVTHSF

SEQ ID NO: 20506 - protein, 9 aa, Artificial Sequence
  Description of Artificial Sequence: Synthetic peptide
QENNEKDLL

SEQ ID NO: 20507 - protein, 9 aa, Artificial Sequence
  Description of Artificial Sequence: Synthetic peptide
KEKGGLDGL

SEQ ID NO: 20508 - protein, 8 aa, Artificial Sequence
  Description of Artificial Sequence: Synthetic peptide
TERVVGDI

SEQ ID NO: 20509 - protein, 9 aa, Artificial Sequence
  Description of Artificial Sequence: Synthetic peptide
KELYPSASL

SEQ ID NO: 20510 - protein, 8 aa, Artificial Sequence
  Description of Artificial Sequence: Synthetic peptide
AELVVTTY

SEQ ID NO: 20511 - protein, 10 aa, Artificial Sequence
  Description of Artificial Sequence: Synthetic peptide
QELKNSAISL

SEQ ID NO: 20512 - protein, 9 aa, Artificial Sequence
  Description of Artificial Sequence: Synthetic peptide
AEWDRVHPV

SEQ ID NO: 20513 - protein, 11 aa, Artificial Sequence
  Description of Artificial Sequence: Synthetic peptide
AEQATQDVKNW

SEQ ID NO: 20514 - protein, 11 aa, Artificial Sequence
  Description of Artificial Sequence: Synthetic peptide
AEQATQEVKNW

SEQ ID NO: 20515 - protein, 11 aa, Artificial Sequence
  Description of Artificial Sequence: Synthetic peptide
QEVNIVTDSQY

SEQ ID NO: 20516 - protein, 9 aa, Artificial Sequence
  Description of Artificial Sequence: Synthetic peptide
EEIDLPGKW

SEQ ID NO: 20517 - protein, 9 aa, Artificial Sequence
  Description of Artificial Sequence: Synthetic peptide
AELVVTTYW

SEQ ID NO: 20518 - protein, 9 aa, Artificial Sequence
  Description of Artificial Sequence: Synthetic peptide
SEIMKNCSF

SEQ ID NO: 20519 - protein, 9 aa, Artificial Sequence
  Description of Artificial Sequence: Synthetic peptide
SEAAIRKAI

SEQ ID NO: 20520 - protein, 9 aa, Artificial Sequence
  Description of Artificial Sequence: Synthetic peptide
VEMGPHDLW

SEQ ID NO: 20521 - protein, 11 aa, Artificial Sequence
  Description of Artificial Sequence: Synthetic peptide
NEQDLLALDKW

SEQ ID NO: 20522 - protein, 11 aa, Artificial Sequence
  Description of Artificial Sequence: Synthetic peptide
AEGQGTVSSNF

SEQ ID NO: 20523 - protein, 9 aa, Artificial Sequence
  Description of Artificial Sequence: Synthetic peptide
AETGQETAF

SEQ ID NO: 20524 - protein, 10 aa, Artificial Sequence
  Description of Artificial Sequence: Synthetic peptide
NETPGIRYQY

SEQ ID NO: 20525 - protein, 11 aa, Artificial Sequence
  Description of Artificial Sequence: Synthetic peptide
AEVQKQGLDQW

SEQ ID NO: 20526 - protein, 9 aa, Artificial Sequence
  Description of Artificial Sequence: Synthetic peptide
AETGQEAAF

SEQ ID NO: 20527 - protein, 9 aa, Artificial Sequence
  Description of Artificial Sequence: Synthetic peptide
NETVNITCF

SEQ ID NO: 20528 - protein, 9 aa, Artificial Sequence
  Description of Artificial Sequence: Synthetic peptide
DEIWNNMTW

SEQ ID NO: 20529 - protein, 9 aa, Artificial Sequence
  Description of Artificial Sequence: Synthetic peptide
EELREQEHF

SEQ ID NO: 20530 - protein, 9 aa, Artificial Sequence
  Description of Artificial Sequence: Synthetic peptide
EDIDLPRKW

SEQ ID NO: 20531 - protein, 11 aa, Artificial Sequence
  Description of Artificial Sequence: Synthetic peptide
QEVNIVTDSQY

SEQ ID NO: 20532 - protein, 11 aa, Artificial Sequence
  Description of Artificial Sequence: Synthetic peptide
AEQATQDVKNW

SEQ ID NO: 20533 - protein, 11 aa, Artificial Sequence
  Description of Artificial Sequence: Synthetic peptide
AEQATQEVKNW

SEQ ID NO: 20534 - protein, 9 aa, Artificial Sequence
  Description of Artificial Sequence: Synthetic peptide
EEIDLPGKW

SEQ ID NO: 20535 - protein, 11 aa, Artificial Sequence
  Description of Artificial Sequence: Synthetic peptide
AEVQKQGLDQW

SEQ ID NO: 20536 - protein, 9 aa, Artificial Sequence
  Description of Artificial Sequence: Synthetic peptide
SEAAIRKAI

SEQ ID NO: 20537 - protein, 9 aa, Artificial Sequence
  Description of Artificial Sequence: Synthetic peptide
SEIMKNCSF

SEQ ID NO: 20538 - protein, 9 aa, Artificial Sequence
  Description of Artificial Sequence: Synthetic peptide
AELVVTTYW

SEQ ID NO: 20539 - protein, 9 aa, Artificial Sequence
  Description of Artificial Sequence: Synthetic peptide
NETVNITCF

SEQ ID NO: 20540 - protein, 9 aa, Artificial Sequence
  Description of Artificial Sequence: Synthetic peptide
AEVVQKIAL

SEQ ID NO: 20541 - protein, 10 aa, Artificial Sequence
  Description of Artificial Sequence: Synthetic peptide
NETPGIRYQY

SEQ ID NO: 20542 - protein, 11 aa, Artificial Sequence
  Description of Artificial Sequence: Synthetic peptide
LEVNIVTDSQY

SEQ ID NO: 20543 - protein, 9 aa, Artificial Sequence
  Description of Artificial Sequence: Synthetic peptide
VEMGPHDLW

SEQ ID NO: 20544 - protein, 11 aa, Artificial Sequence
  Description of Artificial Sequence: Synthetic peptide
AEGQGTVSSNF

SEQ ID NO: 20545 - protein, 11 aa, Artificial Sequence
  Description of Artificial Sequence: Synthetic peptide
NEQDLLALDKW

SEQ ID NO: 20546 - protein, 9 aa, Artificial Sequence
  Description of Artificial Sequence: Synthetic peptide
SESELVNQI

SEQ ID NO: 20547 - protein, 10 aa, Artificial Sequence
  Description of Artificial Sequence: Synthetic peptide
GEAILVITTY

SEQ ID NO: 20548 - protein, 9 aa, Artificial Sequence
  Description of Artificial Sequence: Synthetic peptide
EELREQEHF

SEQ ID NO: 20549 - protein, 9 aa, Artificial Sequence
  Description of Artificial Sequence: Synthetic peptide
AETGQETAF

SEQ ID NO: 20550 - protein, 9 aa, Artificial Sequence
  Description of Artificial Sequence: Synthetic peptide
DEIWNNMTW

SEQ ID NO: 20551 - protein, 10 aa, Artificial Sequence
  Description of Artificial Sequence: Synthetic peptide
RETKIGKAGY

SEQ ID NO: 20552 - protein, 9 aa, Artificial Sequence
  Description of Artificial Sequence: Synthetic peptide
AETGQEAAF

SEQ ID NO: 20553 - protein, 9 aa, Artificial Sequence
  Description of Artificial Sequence: Synthetic peptide
EDIDLPRKW

SEQ ID NO: 20554 - protein, 9 aa, Artificial Sequence
  Description of Artificial Sequence: Synthetic peptide
EEMEKEGKI

SEQ ID NO: 20555 - protein, 8 aa, Artificial Sequence
  Description of Artificial Sequence: Synthetic peptide
AELVVTTY

SEQ ID NO: 20556 - protein, 9 aa, Artificial Sequence
  Description of Artificial Sequence: Synthetic peptide
QELLALDQW

SEQ ID NO: 20557 - protein, 9 aa, Artificial Sequence
  Description of Artificial Sequence: Synthetic peptide
AEMEEEGKI

SEQ ID NO: 20558 - protein, 11 aa, Artificial Sequence
  Description of Artificial Sequence: Synthetic peptide
GEAILVITTYW

SEQ ID NO: 20559 - protein, 9 aa, Artificial Sequence
  Description of Artificial Sequence: Synthetic peptide
QENNEKDLL

SEQ ID NO: 20560 - protein, 11 aa, Artificial Sequence
  Description of Artificial Sequence: Synthetic peptide
NEQELLALDQW

SEQ ID NO: 20561 - protein, 10 aa, Artificial Sequence
  Description of Artificial Sequence: Synthetic peptide
LEDIDLPRKW

SEQ ID NO: 20562 - protein, 9 aa, Artificial Sequence
  Description of Artificial Sequence: Synthetic peptide
IEIEGKKAI

SEQ ID NO: 20563 - protein, 8 aa, Artificial Sequence
  Description of Artificial Sequence: Synthetic peptide
NETPGIRY

SEQ ID NO: 20564 - protein, 10 aa, Artificial Sequence
  Description of Artificial Sequence: Synthetic peptide
RETKTGKAGY

SEQ ID NO: 20565 - protein, 9 aa, Artificial Sequence
  Description of Artificial Sequence: Synthetic peptide
SEIMKNCSF

SEQ ID NO: 20566 - protein, 9 aa, Artificial Sequence
  Description of Artificial Sequence: Synthetic peptide
NETVNITCF

SEQ ID NO: 20567 - protein, 9 aa, Artificial Sequence
  Description of Artificial Sequence: Synthetic peptide
AEVVQKIAL

SEQ ID NO: 20568 - protein, 9 aa, Artificial Sequence
  Description of Artificial Sequence: Synthetic peptide
TEAVQKIAL

SEQ ID NO: 20569 - protein, 11 aa, Artificial Sequence
  Description of Artificial Sequence: Synthetic peptide
AEQATQEVKNW

SEQ ID NO: 20570 - protein, 11 aa, Artificial Sequence
  Description of Artificial Sequence: Synthetic peptide
AEGQGTVSSNF

SEQ ID NO: 20571 - protein, 11 aa, Artificial Sequence
  Description of Artificial Sequence: Synthetic peptide
AEQATQDVKNW

SEQ ID NO: 20572 - protein, 9 aa, Artificial Sequence
  Description of Artificial Sequence: Synthetic peptide
AEMEEEGKI

SEQ ID NO: 20573 - protein, 9 aa, Artificial Sequence
  Description of Artificial Sequence: Synthetic peptide
EEIDLPGKW

SEQ ID NO: 20574 - protein, 9 aa, Artificial Sequence
  Description of Artificial Sequence: Synthetic peptide
AETGQETAF

SEQ ID NO: 20575 - protein, 9 aa, Artificial Sequence
  Description of Artificial Sequence: Synthetic peptide
EELREQEHF

SEQ ID NO: 20576 - protein, 11 aa, Artificial Sequence
  Description of Artificial Sequence: Synthetic peptide
QEVNIVTDSQY

SEQ ID NO: 20577 - protein, 9 aa, Artificial Sequence
  Description of Artificial Sequence: Synthetic peptide
AETGQEAAF

SEQ ID NO: 20578 - protein, 11 aa, Artificial Sequence
  Description of Artificial Sequence: Synthetic peptide
AEVQKQGLDQW

SEQ ID NO: 20579 - protein, 11 aa, Artificial Sequence
  Description of Artificial Sequence: Synthetic peptide
AELELAENREI

SEQ ID NO: 20580 - protein, 10 aa, Artificial Sequence
  Description of Artificial Sequence: Synthetic peptide
AETGQETAFF

SEQ ID NO: 20581 - protein, 9 aa, Artificial Sequence
  Description of Artificial Sequence: Synthetic peptide
QENNEKDLL

SEQ ID NO: 20582 - protein, 11 aa, Artificial Sequence
  Description of Artificial Sequence: Synthetic peptide
AELELAENKEI

SEQ ID NO: 20583 - protein, 9 aa, Artificial Sequence
  Description of Artificial Sequence: Synthetic peptide
SERDWSNTL

SEQ ID NO: 20584 - protein, 10 aa, Artificial Sequence
  Description of Artificial Sequence: Synthetic peptide
AEHLKTAVQM

SEQ ID NO: 20585 - protein, 9 aa, Artificial Sequence
  Description of Artificial Sequence: Synthetic peptide
SESELVNQI

SEQ ID NO: 20586 - protein, 10 aa, Artificial Sequence
  Description of Artificial Sequence: Synthetic peptide
QELKNSAISL

SEQ ID NO: 20587 - protein, 10 aa, Artificial Sequence
  Description of Artificial Sequence: Synthetic peptide
AEELREQEHF

SEQ ID NO: 20588 - protein, 10 aa, Artificial Sequence
  Description of Artificial Sequence: Synthetic peptide
AETGQEAAFF

SEQ ID NO: 20589 - protein, 10 aa, Artificial Sequence
  Description of Artificial Sequence: Synthetic peptide
AEGTDRIIEI

SEQ ID NO: 20590 - protein, 10 aa, Artificial Sequence
  Description of Artificial Sequence: Synthetic peptide
EEIKSLYNTV

SEQ ID NO: 20591 - protein, 9 aa, Artificial Sequence
  Description of Artificial Sequence: Synthetic peptide
SEAAIRKAI

SEQ ID NO: 20592 - protein, 9 aa, Artificial Sequence
  Description of Artificial Sequence: Synthetic peptide
EEMEKEGKI

SEQ ID NO: 20593 - protein, 9 aa, Artificial Sequence
  Description of Artificial Sequence: Synthetic peptide
KESNSSETF

SEQ ID NO: 20594 - protein, 9 aa, Artificial Sequence
  Description of Artificial Sequence: Synthetic peptide
SEGATPQDL

SEQ ID NO: 20595 - protein, 10 aa, Artificial Sequence
  Description of Artificial Sequence: Synthetic peptide
KEPIMGAETF

SEQ ID NO: 20596 - protein, 9 aa, Artificial Sequence
  Description of Artificial Sequence: Synthetic peptide
NEGEDNRLL

SEQ ID NO: 20597 - protein, 9 aa, Artificial Sequence
  Description of Artificial Sequence: Synthetic peptide
SERIPSSCL

SEQ ID NO: 20598 - protein, 10 aa, Artificial Sequence
  Description of Artificial Sequence: Synthetic peptide
GDIEIVTHSF

SEQ ID NO: 20599 - protein, 9 aa, Artificial Sequence
  Description of Artificial Sequence: Synthetic peptide
QEKNEQDLL

SEQ ID NO: 20600 - protein, 9 aa, Artificial Sequence
  Description of Artificial Sequence: Synthetic peptide
QEKNEQELL

SEQ ID NO: 20601 - protein, 9 aa, Artificial Sequence
  Description of Artificial Sequence: Synthetic peptide
EEGTISFSF

SEQ ID NO: 20602 - protein, 11 aa, Artificial Sequence
  Description of Artificial Sequence: Synthetic peptide
LEAQTEEEVGF

SEQ ID NO: 20603 - protein, 8 aa, Artificial Sequence
  Description of Artificial Sequence: Synthetic peptide
GELVHQAL

SEQ ID NO: 20604 - protein, 9 aa, Artificial Sequence
  Description of Artificial Sequence: Synthetic peptide
EELAKLVEM

SEQ ID NO: 20605 - protein, 9 aa, Artificial Sequence
  Description of Artificial Sequence: Synthetic peptide
KELYPSASL

SEQ ID NO: 20606 - protein, 9 aa, Artificial Sequence
  Description of Artificial Sequence: Synthetic peptide
AELVVTTYW

SEQ ID NO: 20607 - protein, 11 aa, Artificial Sequence
  Description of Artificial Sequence: Synthetic peptide
QELKNSAISLL

SEQ ID NO: 20608 - protein, 11 aa, Artificial Sequence
  Description of Artificial Sequence: Synthetic peptide
AEGGEQILVQI

SEQ ID NO: 20609 - protein, 9 aa, Artificial Sequence
  Description of Artificial Sequence: Synthetic peptide
VETNSACAW

SEQ ID NO: 20610 - protein, 9 aa, Artificial Sequence
  Description of Artificial Sequence: Synthetic peptide
QLTEVVQKI

SEQ ID NO: 20611 - protein, 11 aa, Artificial Sequence
  Description of Artificial Sequence: Synthetic peptide
LEVNIVTDSQY

SEQ ID NO: 20612 - protein, 8 aa, Artificial Sequence
  Description of Artificial Sequence: Synthetic peptide
SDIQTKEL

SEQ ID NO: 20613 - protein, 9 aa, Artificial Sequence
  Description of Artificial Sequence: Synthetic peptide
AEGGEQILV

SEQ ID NO: 20614 - protein, 9 aa, Artificial Sequence
  Description of Artificial Sequence: Synthetic peptide
LQKGLGISY

SEQ ID NO: 20615 - protein, 10 aa, Artificial Sequence
  Description of Artificial Sequence: Synthetic peptide
VSIDNSNSSY

SEQ ID NO: 20616 - protein, 10 aa, Artificial Sequence
  Description of Artificial Sequence: Synthetic peptide
ILKEPVHGVY

SEQ ID NO: 20617 - protein, 9 aa, Artificial Sequence
  Description of Artificial Sequence: Synthetic peptide
IIANVTENF

SEQ ID NO: 20618 - protein, 9 aa, Artificial Sequence
  Description of Artificial Sequence: Synthetic peptide
RAVGIGAVF

SEQ ID NO: 20619 - protein, 9 aa, Artificial Sequence
  Description of Artificial Sequence: Synthetic peptide
FLGTAGSTM

SEQ ID NO: 20620 - protein, 9 aa, Artificial Sequence
  Description of Artificial Sequence: Synthetic peptide
KALTDIVAL

SEQ ID NO: 20621 - protein, 8 aa, Artificial Sequence
  Description of Artificial Sequence: Synthetic peptide
GQPVHQAL

SEQ ID NO: 20622 - protein, 10 aa, Artificial Sequence
  Description of Artificial Sequence: Synthetic peptide
SLFGSDPSSQ

SEQ ID NO: 20623 - protein, 9 aa, Artificial Sequence
  Description of Artificial Sequence: Synthetic peptide
KAIEAQQHL

SEQ ID NO: 20624 - protein, 9 aa, Artificial Sequence
  Description of Artificial Sequence: Synthetic peptide
GKKAIGTVL

SEQ ID NO: 20625 - protein, 8 aa, Artificial Sequence
  Description of Artificial Sequence: Synthetic peptide
HQAAMQML

SEQ ID NO: 20626 - protein, 8 aa, Artificial Sequence
  Description of Artificial Sequence: Synthetic peptide
AKTIIVQL

SEQ ID NO: 20627 - protein, 9 aa, Artificial Sequence
  Description of Artificial Sequence: Synthetic peptide
IKPVVSTQL

SEQ ID NO: 20628 - protein, 9 aa, Artificial Sequence
  Description of Artificial Sequence: Synthetic peptide
RALGAGATL

SEQ ID NO: 20629 - protein, 9 aa, Artificial Sequence
  Description of Artificial Sequence: Synthetic peptide
IHMGPGQVL

SEQ ID NO: 20630 - protein, 8 aa, Artificial Sequence
  Description of Artificial Sequence: Synthetic peptide
AKNIIVQL

SEQ ID NO: 20631 - protein, 9 aa, Artificial Sequence
  Description of Artificial Sequence: Synthetic peptide
KALGSGATL

SEQ ID NO: 20632 - protein, 8 aa, Artificial Sequence
  Description of Artificial Sequence: Synthetic peptide
HMGPGQVL

SEQ ID NO: 20633 - protein, 9 aa, Artificial Sequence
  Description of Artificial Sequence: Synthetic peptide
FQQGEAREL

SEQ ID NO: 20634 - protein, 10 aa, Artificial Sequence
  Description of Artificial Sequence: Synthetic peptide
HQDPIPGQPL

SEQ ID NO: 20635 - protein, 8 aa, Artificial Sequence
  Description of Artificial Sequence: Synthetic peptide
KQLQARVL

SEQ ID NO: 20636 - protein, 8 aa, Artificial Sequence
  Description of Artificial Sequence: Synthetic peptide
KKAIGTVL

SEQ ID NO: 20637 - protein, 9 aa, Artificial Sequence
  Description of Artificial Sequence: Synthetic peptide
SESELVNQI

SEQ ID NO: 20638 - protein, 9 aa, Artificial Sequence
  Description of Artificial Sequence: Synthetic peptide
IEIEGKKAI

SEQ ID NO: 20639 - protein, 8 aa, Artificial Sequence
  Description of Artificial Sequence: Synthetic peptide
VEIEPLGV

SEQ ID NO: 20640 - protein, 10 aa, Artificial Sequence
  Description of Artificial Sequence: Synthetic peptide
QEIKSLYNTV

SEQ ID NO: 20641 - protein, 9 aa, Artificial Sequence
  Description of Artificial Sequence: Synthetic peptide
AEMEEEGKI

SEQ ID NO: 20642 - protein, 9 aa, Artificial Sequence
  Description of Artificial Sequence: Synthetic peptide
AEWDRVHPV

SEQ ID NO: 20643 - protein, 10 aa, Artificial Sequence
  Description of Artificial Sequence: Synthetic peptide
CEYQAGHNKV

SEQ ID NO: 20644 - protein, 9 aa, Artificial Sequence
  Description of Artificial Sequence: Synthetic peptide
AEVVQKIAL

SEQ ID NO: 20645 - protein, 9 aa, Artificial Sequence
  Description of Artificial Sequence: Synthetic peptide
REINNYTGI

SEQ ID NO: 20646 - protein, 10 aa, Artificial Sequence
  Description of Artificial Sequence: Synthetic peptide
EEIKSLYNTV

SEQ ID NO: 20647 - protein, 8 aa, Artificial Sequence
  Description of Artificial Sequence: Synthetic peptide
GEQILVQI

SEQ ID NO: 20648 - protein, 10 aa, Artificial Sequence
  Description of Artificial Sequence: Synthetic peptide
AESFGFGEKI

SEQ ID NO: 20649 - protein, 9 aa, Artificial Sequence
  Description of Artificial Sequence: Synthetic peptide
AEGGEQILV

SEQ ID NO: 20650 - protein, 9 aa, Artificial Sequence
  Description of Artificial Sequence: Synthetic peptide
REIDNYTRI

SEQ ID NO: 20651 - protein, 11 aa, Artificial Sequence
  Description of Artificial Sequence: Synthetic peptide
AELELAENREI

SEQ ID NO: 20652 - protein, 8 aa, Artificial Sequence
  Description of Artificial Sequence: Synthetic peptide
DENSTVTI

SEQ ID NO: 20653 - protein, 9 aa, Artificial Sequence
  Description of Artificial Sequence: Synthetic peptide
SEAAIRKAI

SEQ ID NO: 20654 - protein, 9 aa, Artificial Sequence
  Description of Artificial Sequence: Synthetic peptide
TEAVQKIAL

SEQ ID NO: 20655 - protein, 9 aa, Artificial Sequence
  Description of Artificial Sequence: Synthetic peptide
IEIKDTMEA

SEQ ID NO: 20656 - protein, 8 aa, Artificial Sequence
  Description of Artificial Sequence: Synthetic peptide
QEMIIANV

SEQ ID NO: 20657 - protein, 9 aa, Artificial Sequence
  Description of Artificial Sequence: Synthetic peptide
IEIKDTMEA

SEQ ID NO: 20658 - protein, 9 aa, Artificial Sequence
  Description of Artificial Sequence: Synthetic peptide
VEIEPLGVA

SEQ ID NO: 20659 - protein, 9 aa, Artificial Sequence
  Description of Artificial Sequence: Synthetic peptide
AVIGNIRQA

SEQ ID NO: 20660 - protein, 9 aa, Artificial Sequence
  Description of Artificial Sequence: Synthetic peptide
GESGVLLGA

SEQ ID NO: 20661 - protein, 9 aa, Artificial Sequence
  Description of Artificial Sequence: Synthetic peptide
AETFYVDGA

SEQ ID NO: 20662 - protein, 9 aa, Artificial Sequence
  Description of Artificial Sequence: Synthetic peptide
VEINCTRPA

SEQ ID NO: 20663 - protein, 9 aa, Artificial Sequence
  Description of Artificial Sequence: Synthetic peptide
KEVESKAEP

SEQ ID NO: 20664 - protein, 9 aa, Artificial Sequence
  Description of Artificial Sequence: Synthetic peptide
EEVGFPVTP

SEQ ID NO: 20665 - protein, 10 aa, Artificial Sequence
  Description of Artificial Sequence: Synthetic peptide
SEVHIPLGEA

SEQ ID NO: 20666 - protein, 10 aa, Artificial Sequence
  Description of Artificial Sequence: Synthetic peptide
VEIEPLGVAP

SEQ ID NO: 20667 - protein, 9 aa, Artificial Sequence
  Description of Artificial Sequence: Synthetic peptide
LEKEPIMGA

SEQ ID NO: 20668 - protein, 9 aa, Artificial Sequence
  Description of Artificial Sequence: Synthetic peptide
EEVGFPVKP

SEQ ID NO: 20669 - protein, 9 aa, Artificial Sequence
  Description of Artificial Sequence: Synthetic peptide
IVARTVETL

SEQ ID NO: 20670 - protein, 9 aa, Artificial Sequence
  Description of Artificial Sequence: Synthetic peptide
TEVVQKISC

SEQ ID NO: 20671 - protein, 9 aa, Artificial Sequence
  Description of Artificial Sequence: Synthetic peptide
QLAEVVQKI

SEQ ID NO: 20672 - protein, 9 aa, Artificial Sequence
  Description of Artificial Sequence: Synthetic peptide
SEVHIPLGC

SEQ ID NO: 20673 - protein, 10 aa, Artificial Sequence
  Description of Artificial Sequence: Synthetic peptide
RVFGEAISQV

SEQ ID NO: 20674 - protein, 10 aa, Artificial Sequence
  Description of Artificial Sequence: Synthetic peptide
AETFYVDGAA

SEQ ID NO: 20675 - protein, 9 aa, Artificial Sequence
  Description of Artificial Sequence: Synthetic peptide
ATLEEMMTA

SEQ ID NO: 20676 - protein, 9 aa, Artificial Sequence
  Description of Artificial Sequence: Synthetic peptide
RIIEIVQGI

SEQ ID NO: 20677 - protein, 9 aa, Artificial Sequence
  Description of Artificial Sequence: Synthetic peptide
YEDFRKYTA

SEQ ID NO: 20678 - protein, 9 aa, Artificial Sequence
  Description of Artificial Sequence: Synthetic peptide
ASIALTVQA

SEQ ID NO: 20679 - protein, 10 aa, Artificial Sequence
  Description of Artificial Sequence: Synthetic peptide
RELSPEQTRA

SEQ ID NO: 20680 - protein, 10 aa, Artificial Sequence
  Description of Artificial Sequence: Synthetic peptide
REQAEHLKTA

SEQ ID NO: 20681 - protein, 10 aa, Artificial Sequence
  Description of Artificial Sequence: Synthetic peptide
AVFLGFLGTA

SEQ ID NO: 20682 - protein, 9 aa, Artificial Sequence
  Description of Artificial Sequence: Synthetic peptide
EEVGFPVRP

SEQ ID NO: 20683 - protein, 8 aa, Artificial Sequence
  Description of Artificial Sequence: Synthetic peptide
TAFTIPSI

SEQ ID NO: 20684 - protein, 9 aa, Artificial Sequence
  Description of Artificial Sequence: Synthetic peptide
FPISPIETV

SEQ ID NO: 20685 - protein, 8 aa, Artificial Sequence
  Description of Artificial Sequence: Synthetic peptide
DAPAAEGV

SEQ ID NO: 20686 - protein, 10 aa, Artificial Sequence
  Description of Artificial Sequence: Synthetic peptide
IPYNPQSQGV

SEQ ID NO: 20687 - protein, 8 aa, Artificial Sequence
  Description of Artificial Sequence: Synthetic peptide
VPVDPSEV

SEQ ID NO: 20688 - protein, 8 aa, Artificial Sequence
  Description of Artificial Sequence: Synthetic peptide
IALEAIVI

SEQ ID NO: 20689 - protein, 9 aa, Artificial Sequence
  Description of Artificial Sequence: Synthetic peptide
DPNPQEMII

SEQ ID NO: 20690 - protein, 9 aa, Artificial Sequence
  Description of Artificial Sequence: Synthetic peptide
LPPVVAKEI

SEQ ID NO: 20691 - protein, 8 aa, Artificial Sequence
  Description of Artificial Sequence: Synthetic peptide
IAAIVAFI

SEQ ID NO: 20692 - protein, 9 aa, Artificial Sequence
  Description of Artificial Sequence: Synthetic peptide
SPLSFQTLI

SEQ ID NO: 20693 - protein, 9 aa, Artificial Sequence
  Description of Artificial Sequence: Synthetic peptide
LPPIVAKEI

SEQ ID NO: 20694 - protein, 8 aa, Artificial Sequence
  Description of Artificial Sequence: Synthetic peptide
IAAIVGLI

SEQ ID NO: 20695 - protein, 8 aa, Artificial Sequence
  Description of Artificial Sequence: Synthetic peptide
IPLQIAAI

SEQ ID NO: 20696 - protein, 8 aa, Artificial Sequence
  Description of Artificial Sequence: Synthetic peptide
NPYNTPVF

SEQ ID NO: 20697 - protein, 10 aa, Artificial Sequence
  Description of Artificial Sequence: Synthetic peptide
IPLGEAILVI

SEQ ID NO: 20698 - protein, 8 aa, Artificial Sequence
  Description of Artificial Sequence: Synthetic peptide
ISFSFPQI

SEQ ID NO: 20699 - protein, 9 aa, Artificial Sequence
  Description of Artificial Sequence: Synthetic peptide
VGFPVTPQV

SEQ ID NO: 20700 - protein, 9 aa, Artificial Sequence
  Description of Artificial Sequence: Synthetic peptide
SPLSLQTLI

SEQ ID NO: 20701 - protein, 9 aa, Artificial Sequence
  Description of Artificial Sequence: Synthetic peptide
IPIGPGQVL

SEQ ID NO: 20702 - protein, 8 aa, Artificial Sequence
  Description of Artificial Sequence: Synthetic peptide
AASIALTV

SEQ ID NO: 20703 - protein, 9 aa, Artificial Sequence
  Description of Artificial Sequence: Synthetic peptide
NPPIPVGEI

SEQ ID NO: 20704 - protein, 9 aa, Artificial Sequence
  Description of Artificial Sequence: Synthetic peptide
YAPPIAGNI

SEQ ID NO: 20705 - protein, 9 aa, Artificial Sequence
  Description of Artificial Sequence: Synthetic peptide
EALEKIEEI

SEQ ID NO: 20706 - protein, 9 aa, Artificial Sequence
  Description of Artificial Sequence: Synthetic peptide
DAYFSVPLY

SEQ ID NO: 20707 - protein, 9 aa, Artificial Sequence
  Description of Artificial Sequence: Synthetic peptide
IPLQIAAIV

SEQ ID NO: 20708 - protein, 9 aa, Artificial Sequence
  Description of Artificial Sequence: Synthetic peptide
GAASIALTV

SEQ ID NO: 20709 - protein, 11 aa, Artificial Sequence
  Description of Artificial Sequence: Synthetic peptide
IPYNPQSQGVV

SEQ ID NO: 20710 - protein, 8 aa, Artificial Sequence
  Description of Artificial Sequence: Synthetic peptide
SPVSILDI

SEQ ID NO: 20711 - protein, 9 aa, Artificial Sequence
  Description of Artificial Sequence: Synthetic peptide
IPLGEAILV

SEQ ID NO: 20712 - protein, 9 aa, Artificial Sequence
  Description of Artificial Sequence: Synthetic peptide
HPVHAGPVA

SEQ ID NO: 20713 - protein, 9 aa, Artificial Sequence
  Description of Artificial Sequence: Synthetic peptide
FPISPIETV

SEQ ID NO: 20714 - protein, 9 aa, Artificial Sequence
  Description of Artificial Sequence: Synthetic peptide
HPVHAGPIA

SEQ ID NO: 20715 - protein, 9 aa, Artificial Sequence
  Description of Artificial Sequence: Synthetic peptide
NATAIAVAA

SEQ ID NO: 20716 - protein, 9 aa, Artificial Sequence
  Description of Artificial Sequence: Synthetic peptide
EPIPIHYCA

SEQ ID NO: 20717 - protein, 9 aa, Artificial Sequence
  Description of Artificial Sequence: Synthetic peptide
HVASGYIEA

SEQ ID NO: 20718 - protein, 9 aa, Artificial Sequence
  Description of Artificial Sequence: Synthetic peptide
QPIPIHYCA

SEQ ID NO: 20719 - protein, 9 aa, Artificial Sequence
  Description of Artificial Sequence: Synthetic peptide
RAAAPVPAA

SEQ ID NO: 20720 - protein, 9 aa, Artificial Sequence
  Description of Artificial Sequence: Synthetic peptide
IPAETGQEA

SEQ ID NO: 20721 - protein, 9 aa, Artificial Sequence
  Description of Artificial Sequence: Synthetic peptide
HPGSQPKTA

SEQ ID NO: 20722 - protein, 10 aa, Artificial Sequence
  Description of Artificial Sequence: Synthetic peptide
EPLGVAPTKA

SEQ ID NO: 20723 - protein, 11 aa, Artificial Sequence
  Description of Artificial Sequence: Synthetic peptide
FALNPGLLESA

SEQ ID NO: 20724 - protein, 11 aa, Artificial Sequence
  Description of Artificial Sequence: Synthetic peptide
IPIGPGQVLYA

SEQ ID NO: 20725 - protein, 11 aa, Artificial Sequence
  Description of Artificial Sequence: Synthetic peptide
VPVDPSEVEEA

SEQ ID NO: 20726 - protein, 9 aa, Artificial Sequence
  Description of Artificial Sequence: Synthetic peptide
NPYNTPVFA

SEQ ID NO: 20727 - protein, 10 aa, Artificial Sequence
  Description of Artificial Sequence: Synthetic peptide
VPIEIEGKKA

SEQ ID NO: 20728 - protein, 8 aa, Artificial Sequence
  Description of Artificial Sequence: Synthetic peptide
TAFTIPSI

SEQ ID NO: 20729 - protein, 10 aa, Artificial Sequence
  Description of Artificial Sequence: Synthetic peptide
EPLGVAPTRA

SEQ ID NO: 20730 - protein, 10 aa, Artificial Sequence
  Description of Artificial Sequence: Synthetic peptide
YPKPNGSRQA

SEQ ID NO: 20731 - protein, 9 aa, Artificial Sequence
  Description of Artificial Sequence: Synthetic peptide
HPGSQPRTA

SEQ ID NO: 20732 - protein, 10 aa, Artificial Sequence
  Description of Artificial Sequence: Synthetic peptide
IPLQIAAIVA

SEQ ID NO: 20733 - protein, 11 aa, Artificial Sequence
  Description of Artificial Sequence: Synthetic peptide
LPPVVAKEIVA

SEQ ID NO: 20734 - protein, 9 aa, Artificial Sequence
  Description of Artificial Sequence: Synthetic peptide
YPLTSLKSL

SEQ ID NO: 20735 - protein, 9 aa, Artificial Sequence
  Description of Artificial Sequence: Synthetic peptide
QAIYAPPIA

SEQ ID NO: 20736 - protein, 11 aa, Artificial Sequence
  Description of Artificial Sequence: Synthetic peptide
FPISPIETVPV

SEQ ID NO: 20737 - protein, 9 aa, Artificial Sequence
  Description of Artificial Sequence: Synthetic peptide
QPLDIAAIV

SEQ ID NO: 20738 - protein, 9 aa, Artificial Sequence
  Description of Artificial Sequence: Synthetic peptide
FPRPWLHSL

SEQ ID NO: 20739 - protein, 11 aa, Artificial Sequence
  Description of Artificial Sequence: Synthetic peptide
MLNTVGGHQAA

SEQ ID NO: 20740 - protein, 8 aa, Artificial Sequence
  Description of Artificial Sequence: Synthetic peptide
AAAPVPAA

SEQ ID NO: 20741 - protein, 10 aa, Artificial Sequence
  Description of Artificial Sequence: Synthetic peptide
HPVHAGPIAP

SEQ ID NO: 20742 - protein, 9 aa, Artificial Sequence
  Description of Artificial Sequence: Synthetic peptide
YALNPGLLA

SEQ ID NO: 20743 - protein, 9 aa, Artificial Sequence
  Description of Artificial Sequence: Synthetic peptide
HIASGYIEA

SEQ ID NO: 20744 - protein, 9 aa, Artificial Sequence
  Description of Artificial Sequence: Synthetic peptide
FPVTPQVPL

SEQ ID NO: 20745 - protein, 10 aa, Artificial Sequence
  Description of Artificial Sequence: Synthetic peptide
HPVHAGPVAP

SEQ ID NO: 20746 - protein, 9 aa, Artificial Sequence
  Description of Artificial Sequence: Synthetic peptide
FPVKPQIPL

SEQ ID NO: 20747 - protein, 9 aa, Artificial Sequence
  Description of Artificial Sequence: Synthetic peptide
YPSASLKSL

SEQ ID NO: 20748 - protein, 9 aa, Artificial Sequence
  Description of Artificial Sequence: Synthetic peptide
SISERILSA

SEQ ID NO: 20749 - protein, 9 aa, Artificial Sequence
  Description of Artificial Sequence: Synthetic peptide
HPVHAGPVA

SEQ ID NO: 20750 - protein, 10 aa, Artificial Sequence
  Description of Artificial Sequence: Synthetic peptide
YPKPNGSRQA

SEQ ID NO: 20751 - protein, 9 aa, Artificial Sequence
  Description of Artificial Sequence: Synthetic peptide
HPVHAGPIA

SEQ ID NO: 20752 - protein, 9 aa, Artificial Sequence
  Description of Artificial Sequence: Synthetic peptide
IPKQPLSQT

SEQ ID NO: 20753 - protein, 9 aa, Artificial Sequence
  Description of Artificial Sequence: Synthetic peptide
FPISPIETV

SEQ ID NO: 20754 - protein, 9 aa, Artificial Sequence
  Description of Artificial Sequence: Synthetic peptide
RPEPTAPPA

SEQ ID NO: 20755 - protein, 9 aa, Artificial Sequence
  Description of Artificial Sequence: Synthetic peptide
RAAAPVPAA

SEQ ID NO: 20756 - protein, 9 aa, Artificial Sequence
  Description of Artificial Sequence: Synthetic peptide
IPAETGQEA

SEQ ID NO: 20757 - protein, 9 aa, Artificial Sequence
  Description of Artificial Sequence: Synthetic peptide
QPIPIHYCA

SEQ ID NO: 20758 - protein, 9 aa, Artificial Sequence
  Description of Artificial Sequence: Synthetic peptide
IPIGPGQVL

SEQ ID NO: 20759 - protein, 9 aa, Artificial Sequence
  Description of Artificial Sequence: Synthetic peptide
SPTSREPRA

SEQ ID NO: 20760 - protein, 9 aa, Artificial Sequence
  Description of Artificial Sequence: Synthetic peptide
HPVHAGPVA

SEQ ID NO: 20761 - protein, 9 aa, Artificial Sequence
  Description of Artificial Sequence: Synthetic peptide
FPISPIETV

SEQ ID NO: 20762 - protein, 9 aa, Artificial Sequence
  Description of Artificial Sequence: Synthetic peptide
HPVHAGPIA

SEQ ID NO: 20763 - protein, 9 aa, Artificial Sequence
  Description of Artificial Sequence: Synthetic peptide
IPAETGQEA

SEQ ID NO: 20764 - protein, 11 aa, Artificial Sequence
  Description of Artificial Sequence: Synthetic peptide
APAPAADGVGA

SEQ ID NO: 20765 - protein, 9 aa, Artificial Sequence
  Description of Artificial Sequence: Synthetic peptide
APAAEGVGA

SEQ ID NO: 20766 - protein, 11 aa, Artificial Sequence
  Description of Artificial Sequence: Synthetic peptide
APVPAADGVGA

SEQ ID NO: 20767 - protein, 10 aa, Artificial Sequence
  Description of Artificial Sequence: Synthetic peptide
IPAETGQEAA

SEQ ID NO: 20768 - protein, 10 aa, Artificial Sequence
  Description of Artificial Sequence: Synthetic peptide
IPLQIAAIVA

SEQ ID NO: 20769 - protein, 10 aa, Artificial Sequence
  Description of Artificial Sequence: Synthetic peptide
IPAETGQETA

SEQ ID NO: 20770 - protein, 9 aa, Artificial Sequence
  Description of Artificial Sequence: Synthetic peptide
NATAIAVAA

SEQ ID NO: 20771 - protein, 10 aa, Artificial Sequence
  Description of Artificial Sequence: Synthetic peptide
APAAEGVGAA

SEQ ID NO: 20772 - protein, 9 aa, Artificial Sequence
  Description of Artificial Sequence: Synthetic peptide
NPYNTPVFA

SEQ ID NO: 20773 - protein, 9 aa, Artificial Sequence
  Description of Artificial Sequence: Synthetic peptide
TPASPTSDA

SEQ ID NO: 20774 - protein, 10 aa, Artificial Sequence
  Description of Artificial Sequence: Synthetic peptide
VPIEIEGKKA

SEQ ID NO: 20775 - protein, 10 aa, Artificial Sequence
  Description of Artificial Sequence: Synthetic peptide
YPKPNGSRQA

SEQ ID NO: 20776 - protein, 9 aa, Artificial Sequence
  Description of Artificial Sequence: Synthetic peptide
RPEPTAPPA

SEQ ID NO: 20777 - protein, 9 aa, Artificial Sequence
  Description of Artificial Sequence: Synthetic peptide
QPIPIHYCA

SEQ ID NO: 20778 - protein, 9 aa, Artificial Sequence
  Description of Artificial Sequence: Synthetic peptide
RAAAPVPAA

SEQ ID NO: 20779 - protein, 9 aa, Artificial Sequence
  Description of Artificial Sequence: Synthetic peptide
IPIGPGQVL

SEQ ID NO: 20780 - protein, 9 aa, Artificial Sequence
  Description of Artificial Sequence: Synthetic peptide
QPLDIAAIV

SEQ ID NO: 20781 - protein, 10 aa, Artificial Sequence
  Description of Artificial Sequence: Synthetic peptide
EPLGVAPTKA

SEQ ID NO: 20782 - protein, 9 aa, Artificial Sequence
  Description of Artificial Sequence: Synthetic peptide
VPAADGVGA

SEQ ID NO: 20783 - protein, 9 aa, Artificial Sequence
  Description of Artificial Sequence: Synthetic peptide
HPGSQPKTA

SEQ ID NO: 20784 - protein, 11 aa, Artificial Sequence
  Description of Artificial Sequence: Synthetic peptide
VPVDPSEVEEA

SEQ ID NO: 20785 - protein, 10 aa, Artificial Sequence
  Description of Artificial Sequence: Synthetic peptide
IPYNPQSQGV

SEQ ID NO: 20786 - protein, 9 aa, Artificial Sequence
  Description of Artificial Sequence: Synthetic peptide
HPVHAGPVA

SEQ ID NO: 20787 - protein, 9 aa, Artificial Sequence
  Description of Artificial Sequence: Synthetic peptide
FPISPIETV

SEQ ID NO: 20788 - protein, 9 aa, Artificial Sequence
  Description of Artificial Sequence: Synthetic peptide
HPVHAGPIA

SEQ ID NO: 20789 - protein, 11 aa, Artificial Sequence
  Description of Artificial Sequence: Synthetic peptide
APAPAADGVGA

SEQ ID NO: 20790 - protein, 9 aa, Artificial Sequence
  Description of Artificial Sequence: Synthetic peptide
IPAETGQEA

SEQ ID NO: 20791 - protein, 9 aa, Artificial Sequence
  Description of Artificial Sequence: Synthetic peptide
RAAAPVPAA

SEQ ID NO: 20792 - protein, 9 aa, Artificial Sequence
  Description of Artificial Sequence: Synthetic peptide
APAAEGVGA

SEQ ID NO: 20793 - protein, 10 aa, Artificial Sequence
  Description of Artificial Sequence: Synthetic peptide
IPYNPQSQGV

SEQ ID NO: 20794 - protein, 9 aa, Artificial Sequence
  Description of Artificial Sequence: Synthetic peptide
QPIPIHYCA

SEQ ID NO: 20795 - protein, 10 aa, Artificial Sequence
  Description of Artificial Sequence: Synthetic peptide
YPKPNGSRQA

SEQ ID NO: 20796 - protein, 10 aa, Artificial Sequence
  Description of Artificial Sequence: Synthetic peptide
APAAEGVGAA

SEQ ID NO: 20797 - protein, 10 aa, Artificial Sequence
  Description of Artificial Sequence: Synthetic peptide
APAGFAILKC

SEQ ID NO: 20798 - protein, 11 aa, Artificial Sequence
  Description of Artificial Sequence: Synthetic peptide
APVPAADGVGA

SEQ ID NO: 20799 - protein, 10 aa, Artificial Sequence
  Description of Artificial Sequence: Synthetic peptide
VPIEIEGKKA

SEQ ID NO: 20800 - protein, 10 aa, Artificial Sequence
  Description of Artificial Sequence: Synthetic peptide
IPAETGQEAA

SEQ ID NO: 20801 - protein, 9 aa, Artificial Sequence
  Description of Artificial Sequence: Synthetic peptide
NATAIAVAA

SEQ ID NO: 20802 - protein, 10 aa, Artificial Sequence
  Description of Artificial Sequence: Synthetic peptide
IPAETGQETA

SEQ ID NO: 20803 - protein, 10 aa, Artificial Sequence
  Description of Artificial Sequence: Synthetic peptide
IPLQIAAIVA

SEQ ID NO: 20804 - protein, 9 aa, Artificial Sequence
  Description of Artificial Sequence: Synthetic peptide
RPEPTAPPA

SEQ ID NO: 20805 - protein, 9 aa, Artificial Sequence
  Description of Artificial Sequence: Synthetic peptide
IPIGPGQVL

SEQ ID NO: 20806 - protein, 10 aa, Artificial Sequence
  Description of Artificial Sequence: Synthetic peptide
SPEVIPMFSA

SEQ ID NO: 20807 - protein, 9 aa, Artificial Sequence
  Description of Artificial Sequence: Synthetic peptide
HPGSQPKTA

SEQ ID NO: 20808 - protein, 11 aa, Artificial Sequence
  Description of Artificial Sequence: Synthetic peptide
VPVDPSEVEEA

SEQ ID NO: 20809 - protein, 9 aa, Artificial Sequence
  Description of Artificial Sequence: Synthetic peptide
TPASPTSDA

SEQ ID NO: 20810 - protein, 9 aa, Artificial Sequence
  Description of Artificial Sequence: Synthetic peptide
APAPAADGV

SEQ ID NO: 20811 - protein, 9 aa, Artificial Sequence
  Description of Artificial Sequence: Synthetic peptide
TTVPWNTTW

SEQ ID NO: 20812 - protein, 11 aa, Artificial Sequence
  Description of Artificial Sequence: Synthetic peptide
KSYSTESHNVW

SEQ ID NO: 20813 - protein, 11 aa, Artificial Sequence
  Description of Artificial Sequence: Synthetic peptide
KSYSTEKHNVW

SEQ ID NO: 20814 - protein, 9 aa, Artificial Sequence
  Description of Artificial Sequence: Synthetic peptide
TSKLFNSSW

SEQ ID NO: 20815 - protein, 9 aa, Artificial Sequence
  Description of Artificial Sequence: Synthetic peptide
RSWQNLWKW

SEQ ID NO: 20816 - protein, 11 aa, Artificial Sequence
  Description of Artificial Sequence: Synthetic peptide
KAYSTEKHNVW

SEQ ID NO: 20817 - protein, 11 aa, Artificial Sequence
  Description of Artificial Sequence: Synthetic peptide
RTVGTLGLRGW

SEQ ID NO: 20818 - protein, 9 aa, Artificial Sequence
  Description of Artificial Sequence: Synthetic peptide
KVMETQMNW

SEQ ID NO: 20819 - protein, 9 aa, Artificial Sequence
  Description of Artificial Sequence: Synthetic peptide
FSFPQITLW

SEQ ID NO: 20820 - protein, 9 aa, Artificial Sequence
  Description of Artificial Sequence: Synthetic peptide
STLQEQIGW

SEQ ID NO: 20821 - protein, 9 aa, Artificial Sequence
  Description of Artificial Sequence: Synthetic peptide
TVMETQRSW

SEQ ID NO: 20822 - protein, 11 aa, Artificial Sequence
  Description of Artificial Sequence: Synthetic peptide
ISFSFPQITLW

SEQ ID NO: 20823 - protein, 9 aa, Artificial Sequence
  Description of Artificial Sequence: Synthetic peptide
YSTESHNVW

SEQ ID NO: 20824 - protein, 10 aa, Artificial Sequence
  Description of Artificial Sequence: Synthetic peptide
TTNVPWNSSW

SEQ ID NO: 20825 - protein, 10 aa, Artificial Sequence
  Description of Artificial Sequence: Synthetic peptide
TTTVPWNTTW

SEQ ID NO: 20826 - protein, 9 aa, Artificial Sequence
  Description of Artificial Sequence: Synthetic peptide
RSIRLVNGF

SEQ ID NO: 20827 - protein, 9 aa, Artificial Sequence
  Description of Artificial Sequence: Synthetic peptide
RVMETQKNW

SEQ ID NO: 20828 - protein, 9 aa, Artificial Sequence
  Description of Artificial Sequence: Synthetic peptide
YSTEKHNVW

SEQ ID NO: 20829 - protein, 9 aa, Artificial Sequence
  Description of Artificial Sequence: Synthetic peptide
TSILFNSSW

SEQ ID NO: 20830 - protein, 9 aa, Artificial Sequence
  Description of Artificial Sequence: Synthetic peptide
STLQEQIAW

SEQ ID NO: 20831 - protein, 11 aa, Artificial Sequence
  Description of Artificial Sequence: Synthetic peptide
TTSTLQEQIGW

SEQ ID NO: 20832 - protein, 10 aa, Artificial Sequence
  Description of Artificial Sequence: Synthetic peptide
TTNVPWNASW

SEQ ID NO: 20833 - protein, 11 aa, Artificial Sequence
  Description of Artificial Sequence: Synthetic peptide
SVLSGGKLDTW

SEQ ID NO: 20834 - protein, 10 aa, Artificial Sequence
  Description of Artificial Sequence: Synthetic peptide
RVVGDIRRAY

SEQ ID NO: 20835 - protein, 9 aa, Artificial Sequence
  Description of Artificial Sequence: Synthetic peptide
KIKQIVRMW

SEQ ID NO: 20836 - protein, 11 aa, Artificial Sequence
  Description of Artificial Sequence: Synthetic peptide
KSLFNTEATLY

SEQ ID NO: 20837 - protein, 10 aa, Artificial Sequence
  Description of Artificial Sequence: Synthetic peptide
KAIEAQQHLL

SEQ ID NO: 20838 - protein, 10 aa, Artificial Sequence
  Description of Artificial Sequence: Synthetic peptide
VTVYYGVPVW

SEQ ID NO: 20839 - protein, 9 aa, Artificial Sequence
  Description of Artificial Sequence: Synthetic peptide
IALEAIVIW

SEQ ID NO: 20840 - protein, 11 aa, Artificial Sequence
  Description of Artificial Sequence: Synthetic peptide
KALTDIVPLTR

SEQ ID NO: 20841 - protein, 9 aa, Artificial Sequence
  Description of Artificial Sequence: Synthetic peptide
ITPPLVKLW

SEQ ID NO: 20842 - protein, 9 aa, Artificial Sequence
  Description of Artificial Sequence: Synthetic peptide
RSIRLVSGF

SEQ ID NO: 20843 - protein, 9 aa, Artificial Sequence
  Description of Artificial Sequence: Synthetic peptide
QATQDVKNW

SEQ ID NO: 20844 - protein, 9 aa, Artificial Sequence
  Description of Artificial Sequence: Synthetic peptide
KTAVQMAVF

SEQ ID NO: 20845 - protein, 11 aa, Artificial Sequence
  Description of Artificial Sequence: Synthetic peptide
RTVETLGRRGW

SEQ ID NO: 20846 - protein, 10 aa, Artificial Sequence
  Description of Artificial Sequence: Synthetic peptide
LALDQWGNLW

SEQ ID NO: 20847 - protein, 9 aa, Artificial Sequence
  Description of Artificial Sequence: Synthetic peptide
WSKSSIVGW

SEQ ID NO: 20848 - protein, 9 aa, Artificial Sequence
  Description of Artificial Sequence: Synthetic peptide
AILVITTYW

SEQ ID NO: 20849 - protein, 9 aa, Artificial Sequence
  Description of Artificial Sequence: Synthetic peptide
KVMETQMNW

SEQ ID NO: 20850 - protein, 9 aa, Artificial Sequence
  Description of Artificial Sequence: Synthetic peptide
TTVPWNTTW

SEQ ID NO: 20851 - protein, 9 aa, Artificial Sequence
  Description of Artificial Sequence: Synthetic peptide
KAIEAQQHL

SEQ ID NO: 20852 - protein, 9 aa, Artificial Sequence
  Description of Artificial Sequence: Synthetic peptide
YSTESHNVW

SEQ ID NO: 20853 - protein, 9 aa, Artificial Sequence
  Description of Artificial Sequence: Synthetic peptide
STLQEQIGW

SEQ ID NO: 20854 - protein, 9 aa, Artificial Sequence
  Description of Artificial Sequence: Synthetic peptide
IIANVTENF

SEQ ID NO: 20855 - protein, 9 aa, Artificial Sequence
  Description of Artificial Sequence: Synthetic peptide
GTEEIKSLY

SEQ ID NO: 20856 - protein, 9 aa, Artificial Sequence
  Description of Artificial Sequence: Synthetic peptide
RAVGIGAVF

SEQ ID NO: 20857 - protein, 9 aa, Artificial Sequence
  Description of Artificial Sequence: Synthetic peptide
TVMETQRSW

SEQ ID NO: 20858 - protein, 10 aa, Artificial Sequence
  Description of Artificial Sequence: Synthetic peptide
TAATNADCAW

SEQ ID NO: 20859 - protein, 10 aa, Artificial Sequence
  Description of Artificial Sequence: Synthetic peptide
KAIEAQQHLL

SEQ ID NO: 20860 - protein, 11 aa, Artificial Sequence
  Description of Artificial Sequence: Synthetic peptide
KSYSTESHNVW

SEQ ID NO: 20861 - protein, 9 aa, Artificial Sequence
  Description of Artificial Sequence: Synthetic peptide
STLQEQIAW

SEQ ID NO: 20862 - protein, 9 aa, Artificial Sequence
  Description of Artificial Sequence: Synthetic peptide
NETVNITCF

SEQ ID NO: 20863 - protein, 9 aa, Artificial Sequence
  Description of Artificial Sequence: Synthetic peptide
KALTDIVAL

SEQ ID NO: 20864 - protein, 9 aa, Artificial Sequence
  Description of Artificial Sequence: Synthetic peptide
TSILFNSSW

SEQ ID NO: 20865 - protein, 10 aa, Artificial Sequence
  Description of Artificial Sequence: Synthetic peptide
VSIDNSNSSY

SEQ ID NO: 20866 - protein, 9 aa, Artificial Sequence
  Description of Artificial Sequence: Synthetic peptide
GTQEIKSLY

SEQ ID NO: 20867 - protein, 8 aa, Artificial Sequence
  Description of Artificial Sequence: Synthetic peptide
KTVEIVCY

SEQ ID NO: 20868 - protein, 10 aa, Artificial Sequence
  Description of Artificial Sequence: Synthetic peptide
TATTNADCAW

SEQ ID NO: 20869 - protein, 8 aa, Artificial Sequence
  Description of Artificial Sequence: Synthetic peptide
IEIVTHSF

SEQ ID NO: 20870 - protein, 9 aa, Artificial Sequence
  Description of Artificial Sequence: Synthetic peptide
KTAVQMAVF

SEQ ID NO: 20871 - protein, 8 aa, Artificial Sequence
  Description of Artificial Sequence: Synthetic peptide
GQGVSIEW

SEQ ID NO: 20872 - protein, 11 aa, Artificial Sequence
  Description of Artificial Sequence: Synthetic peptide
KSLFNTEATLY

SEQ ID NO: 20873 - protein, 9 aa, Artificial Sequence
  Description of Artificial Sequence: Synthetic peptide
QATQDVKNW

SEQ ID NO: 20874 - protein, 9 aa, Artificial Sequence
  Description of Artificial Sequence: Synthetic peptide
TINEEAAEW

SEQ ID NO: 20875 - protein, 9 aa, Artificial Sequence
  Description of Artificial Sequence: Synthetic peptide
ASITLTVQV

SEQ ID NO: 20876 - protein, 9 aa, Artificial Sequence
  Description of Artificial Sequence: Synthetic peptide
YSPLSFQTL

SEQ ID NO: 20877 - protein, 9 aa, Artificial Sequence
  Description of Artificial Sequence: Synthetic peptide
YSPLSLQTL

SEQ ID NO: 20878 - protein, 8 aa, Artificial Sequence
  Description of Artificial Sequence: Synthetic peptide
NSPTSRKL

SEQ ID NO: 20879 - protein, 9 aa, Artificial Sequence
  Description of Artificial Sequence: Synthetic peptide
YSPVSILDI

SEQ ID NO: 20880 - protein, 9 aa, Artificial Sequence
  Description of Artificial Sequence: Synthetic peptide
HIPLGCAEL

SEQ ID NO: 20881 - protein, 9 aa, Artificial Sequence
  Description of Artificial Sequence: Synthetic peptide
LQKGLGISY

SEQ ID NO: 20882 - protein, 9 aa, Artificial Sequence
  Description of Artificial Sequence: Synthetic peptide
NAKNILVQF

SEQ ID NO: 20883 - protein, 9 aa, Artificial Sequence
  Description of Artificial Sequence: Synthetic peptide
RAVGIGAVF

SEQ ID NO: 20884 - protein, 9 aa, Artificial Sequence
  Description of Artificial Sequence: Synthetic peptide
GTEEIKSLY

SEQ ID NO: 20885 - protein, 8 aa, Artificial Sequence
  Description of Artificial Sequence: Synthetic peptide
AELVVTTY

SEQ ID NO: 20886 - protein, 9 aa, Artificial Sequence
  Description of Artificial Sequence: Synthetic peptide
EAILVITTY

SEQ ID NO: 20887 - protein, 9 aa, Artificial Sequence
  Description of Artificial Sequence: Synthetic peptide
CAELVVTTY

SEQ ID NO: 20888 - protein, 8 aa, Artificial Sequence
  Description of Artificial Sequence: Synthetic peptide
VLDVGDAY

SEQ ID NO: 20889 - protein, 9 aa, Artificial Sequence
  Description of Artificial Sequence: Synthetic peptide
KAIEAQQHL

SEQ ID NO: 20890 - protein, 9 aa, Artificial Sequence
  Description of Artificial Sequence: Synthetic peptide
LALDKWTSL

SEQ ID NO: 20891 - protein, 9 aa, Artificial Sequence
  Description of Artificial Sequence: Synthetic peptide
LAWDDLRSL

SEQ ID NO: 20892 - protein, 9 aa, Artificial Sequence
  Description of Artificial Sequence: Synthetic peptide
FQQGEAREL

SEQ ID NO: 20893 - protein, 9 aa, Artificial Sequence
  Description of Artificial Sequence: Synthetic peptide
KALGSGATL

SEQ ID NO: 20894 - protein, 9 aa, Artificial Sequence
  Description of Artificial Sequence: Synthetic peptide
KAIEAQQHL

SEQ ID NO: 20895 - protein, 9 aa, Artificial Sequence
  Description of Artificial Sequence: Synthetic peptide
LALDKWTSL

SEQ ID NO: 20896 - protein, 9 aa, Artificial Sequence
  Description of Artificial Sequence: Synthetic peptide
FQQGEAREL

SEQ ID NO: 20897 - protein, 9 aa, Artificial Sequence
  Description of Artificial Sequence: Synthetic peptide
KALGSGATL

SEQ ID NO: 20898 - protein, 9 aa, Artificial Sequence
  Description of Artificial Sequence: Synthetic peptide
FTSPSGGDL

SEQ ID NO: 20899 - protein, 9 aa, Artificial Sequence
  Description of Artificial Sequence: Synthetic peptide
YVDRFFKTL

SEQ ID NO: 20900 - protein, 9 aa, Artificial Sequence
  Description of Artificial Sequence: Synthetic peptide
LAWDDLRSL

SEQ ID NO: 20901 - protein, 9 aa, Artificial Sequence
  Description of Artificial Sequence: Synthetic peptide
SAEPVPLQL

SEQ ID NO: 20902 - protein, 9 aa, Artificial Sequence
  Description of Artificial Sequence: Synthetic peptide
YYDSAKELI

SEQ ID NO: 20903 - protein, 8 aa, Artificial Sequence
  Description of Artificial Sequence: Synthetic peptide
YYDSAKEL

SEQ ID NO: 20904 - protein, 8 aa, Artificial Sequence
  Description of Artificial Sequence: Synthetic peptide
HTDNGSNF

SEQ ID NO: 20905 - protein, 9 aa, Artificial Sequence
  Description of Artificial Sequence: Synthetic peptide
SAEPVPLQL

SEQ ID NO: 20906 - protein, 9 aa, Artificial Sequence
  Description of Artificial Sequence: Synthetic peptide
IQDNSEIKV

SEQ ID NO: 20907 - protein, 9 aa, Artificial Sequence
  Description of Artificial Sequence: Synthetic peptide
ATDIQTREL

SEQ ID NO: 20908 - protein, 9 aa, Artificial Sequence
  Description of Artificial Sequence: Synthetic peptide
AADKMWVTV

SEQ ID NO: 20909 - protein, 9 aa, Artificial Sequence
  Description of Artificial Sequence: Synthetic peptide
ISDNAKTII

SEQ ID NO: 20910 - protein, 9 aa, Artificial Sequence
  Description of Artificial Sequence: Synthetic peptide
VLDVGDAYF

SEQ ID NO: 20911 - protein, 9 aa, Artificial Sequence
  Description of Artificial Sequence: Synthetic peptide
IQDNSDIKV

SEQ ID NO: 20912 - protein, 9 aa, Artificial Sequence
  Description of Artificial Sequence: Synthetic peptide
QRPLVTIRI

SEQ ID NO: 20913 - protein, 9 aa, Artificial Sequence
  Description of Artificial Sequence: Synthetic peptide
QRPLVTVRV

SEQ ID NO: 20914 - protein, 9 aa, Artificial Sequence
  Description of Artificial Sequence: Synthetic peptide
EAILVITTY

SEQ ID NO: 20915 - protein, 9 aa, Artificial Sequence
  Description of Artificial Sequence: Synthetic peptide
VALTAEAEL

SEQ ID NO: 20916 - protein, 9 aa, Artificial Sequence
  Description of Artificial Sequence: Synthetic peptide
KALTDIVAL

SEQ ID NO: 20917 - protein, 9 aa, Artificial Sequence
  Description of Artificial Sequence: Synthetic peptide
SAEPVPLQL

SEQ ID NO: 20918 - protein, 9 aa, Artificial Sequence
  Description of Artificial Sequence: Synthetic peptide
KAIEAQQHL

SEQ ID NO: 20919 - protein, 9 aa, Artificial Sequence
  Description of Artificial Sequence: Synthetic peptide
LQKGLGISY

SEQ ID NO: 20920 - protein, 9 aa, Artificial Sequence
  Description of Artificial Sequence: Synthetic peptide
TVLDVGDAY

SEQ ID NO: 20921 - protein, 9 aa, Artificial Sequence
  Description of Artificial Sequence: Synthetic peptide
HMGPGQVLY

SEQ ID NO: 20922 - protein, 9 aa, Artificial Sequence
  Description of Artificial Sequence: Synthetic peptide
TVMETQRSW

SEQ ID NO: 20923 - protein, 9 aa, Artificial Sequence
  Description of Artificial Sequence: Synthetic peptide
IVTDSQYAL

SEQ ID NO: 20924 - protein, 9 aa, Artificial Sequence
  Description of Artificial Sequence: Synthetic peptide
ASDIQTKEL

SEQ ID NO: 20925 - protein, 9 aa, Artificial Sequence
  Description of Artificial Sequence: Synthetic peptide
ATDIQTREL

SEQ ID NO: 20926 - protein, 9 aa, Artificial Sequence
  Description of Artificial Sequence: Synthetic peptide
TQDFWEVQL

SEQ ID NO: 20927 - protein, 9 aa, Artificial Sequence
  Description of Artificial Sequence: Synthetic peptide
ISDNAKTII

SEQ ID NO: 20928 - protein, 8 aa, Artificial Sequence
  Description of Artificial Sequence: Synthetic peptide
AVDLSFFL

SEQ ID NO: 20929 - protein, 9 aa, Artificial Sequence
  Description of Artificial Sequence: Synthetic peptide
SAEPVPLQL

SEQ ID NO: 20930 - protein, 10 aa, Artificial Sequence
  Description of Artificial Sequence: Synthetic peptide
SLFGSDPSSQ

SEQ ID NO: 20931 - protein, 9 aa, Artificial Sequence
  Description of Artificial Sequence: Synthetic peptide
ILVQLQPAL

SEQ ID NO: 20932 - protein, 9 aa, Artificial Sequence
  Description of Artificial Sequence: Synthetic peptide
FQQGEAREL

SEQ ID NO: 20933 - protein, 9 aa, Artificial Sequence
  Description of Artificial Sequence: Synthetic peptide
RALGAGATL

SEQ ID NO: 20934 - protein, 8 aa, Artificial Sequence
  Description of Artificial Sequence: Synthetic peptide
GQPVHQAL

SEQ ID NO: 20935 - protein, 10 aa, Artificial Sequence
  Description of Artificial Sequence: Synthetic peptide
SLFGSDPLSQ

SEQ ID NO: 20936 - protein, 9 aa, Artificial Sequence
  Description of Artificial Sequence: Synthetic peptide
KALGSGATL

SEQ ID NO: 20937 - protein, 9 aa, Artificial Sequence
  Description of Artificial Sequence: Synthetic peptide
KALTDIVAL

SEQ ID NO: 20938 - protein, 10 aa, Artificial Sequence
  Description of Artificial Sequence: Synthetic peptide
QDSGQEVNIV

SEQ ID NO: 20939 - protein, 9 aa, Artificial Sequence
  Description of Artificial Sequence: Synthetic peptide
NAKNIIVQL

SEQ ID NO: 20940 - protein, 9 aa, Artificial Sequence
  Description of Artificial Sequence: Synthetic peptide
NAKTIIVQL

SEQ ID NO: 20941 - protein, 10 aa, Artificial Sequence
  Description of Artificial Sequence: Synthetic peptide
VSFEPIPIHY

SEQ ID NO: 20942 - protein, 9 aa, Artificial Sequence
  Description of Artificial Sequence: Synthetic peptide
SAKELIAEV

SEQ ID NO: 20943 - protein, 9 aa, Artificial Sequence
  Description of Artificial Sequence: Synthetic peptide
GAASIALTV

SEQ ID NO: 20944 - protein, 9 aa, Artificial Sequence
  Description of Artificial Sequence: Synthetic peptide
GAASITLTV

SEQ ID NO: 20945 - protein, 9 aa, Artificial Sequence
  Description of Artificial Sequence: Synthetic peptide
NAKNILVQF

SEQ ID NO: 20946 - protein, 9 aa, Artificial Sequence
  Description of Artificial Sequence: Synthetic peptide
VSSNWNRVL

SEQ ID NO: 20947 - protein, 9 aa, Artificial Sequence
  Description of Artificial Sequence: Synthetic peptide
ASITLTVQV

SEQ ID NO: 20948 - protein, 9 aa, Artificial Sequence
  Description of Artificial Sequence: Synthetic peptide
VYYDSAKEL

SEQ ID NO: 20949 - protein, 9 aa, Artificial Sequence
  Description of Artificial Sequence: Synthetic peptide
IYQEPFKNL

SEQ ID NO: 20950 - protein, 9 aa, Artificial Sequence
  Description of Artificial Sequence: Synthetic peptide
VFIEYRKVL

SEQ ID NO: 20951 - protein, 10 aa, Artificial Sequence
  Description of Artificial Sequence: Synthetic peptide
YFNESTTINF

SEQ ID NO: 20952 - protein, 10 aa, Artificial Sequence
  Description of Artificial Sequence: Synthetic peptide
GFLGTAGSTM

SEQ ID NO: 20953 - protein, 9 aa, Artificial Sequence
  Description of Artificial Sequence: Synthetic peptide
LYNTVATLY

SEQ ID NO: 20954 - protein, 8 aa, Artificial Sequence
  Description of Artificial Sequence: Synthetic peptide
LYNTVATL

SEQ ID NO: 20955 - protein, 10 aa, Artificial Sequence
  Description of Artificial Sequence: Synthetic peptide
AFQQGEAREL

SEQ ID NO: 20956 - protein, 9 aa, Artificial Sequence
  Description of Artificial Sequence: Synthetic peptide
TYQIYQEPF

SEQ ID NO: 20957 - protein, 8 aa, Artificial Sequence
  Description of Artificial Sequence: Synthetic peptide
VYNTQGYF

SEQ ID NO: 20958 - protein, 9 aa, Artificial Sequence
  Description of Artificial Sequence: Synthetic peptide
IFRPTGGDM

SEQ ID NO: 20959 - protein, 9 aa, Artificial Sequence
  Description of Artificial Sequence: Synthetic peptide
FFYCNTSSL

SEQ ID NO: 20960 - protein, 9 aa, Artificial Sequence
  Description of Artificial Sequence: Synthetic peptide
SYQTGTEEI

SEQ ID NO: 20961 - protein, 9 aa, Artificial Sequence
  Description of Artificial Sequence: Synthetic peptide
KYHSNWRAM

SEQ ID NO: 20962 - protein, 8 aa, Artificial Sequence
  Description of Artificial Sequence: Synthetic peptide
NYPIVQNL

SEQ ID NO: 20963 - protein, 9 aa, Artificial Sequence
  Description of Artificial Sequence: Synthetic peptide
VYYDSAKEL

SEQ ID NO: 20964 - protein, 8 aa, Artificial Sequence
  Description of Artificial Sequence: Synthetic peptide
LYNTVATL

SEQ ID NO: 20965 - protein, 9 aa, Artificial Sequence
  Description of Artificial Sequence: Synthetic peptide
IYQEPFKNL

SEQ ID NO: 20966 - protein, 10 aa, Artificial Sequence
  Description of Artificial Sequence: Synthetic peptide
GFLGTAGSTM

SEQ ID NO: 20967 - protein, 9 aa, Artificial Sequence
  Description of Artificial Sequence: Synthetic peptide
SYQTGTEEI

SEQ ID NO: 20968 - protein, 9 aa, Artificial Sequence
  Description of Artificial Sequence: Synthetic peptide
TYQIYQEPF

SEQ ID NO: 20969 - protein, 9 aa, Artificial Sequence
  Description of Artificial Sequence: Synthetic peptide
LYNTVATLY

SEQ ID NO: 20970 - protein, 8 aa, Artificial Sequence
  Description of Artificial Sequence: Synthetic peptide
VYNTQGYF

SEQ ID NO: 20971 - protein, 9 aa, Artificial Sequence
  Description of Artificial Sequence: Synthetic peptide
ASITLTVQV

SEQ ID NO: 20972 - protein, 9 aa, Artificial Sequence
  Description of Artificial Sequence: Synthetic peptide
TSNITGLLL

SEQ ID NO: 20973 - protein, 9 aa, Artificial Sequence
  Description of Artificial Sequence: Synthetic peptide
RIIYNLIEV

SEQ ID NO: 20974 - protein, 9 aa, Artificial Sequence
  Description of Artificial Sequence: Synthetic peptide
GAASIALTV

SEQ ID NO: 20975 - protein, 9 aa, Artificial Sequence
  Description of Artificial Sequence: Synthetic peptide
SSNITGLIL

SEQ ID NO: 20976 - protein, 9 aa, Artificial Sequence
  Description of Artificial Sequence: Synthetic peptide
KTELHAIYL

SEQ ID NO: 20977 - protein, 10 aa, Artificial Sequence
  Description of Artificial Sequence: Synthetic peptide
KVVEIEPLGV

SEQ ID NO: 20978 - protein, 9 aa, Artificial Sequence
  Description of Artificial Sequence: Synthetic peptide
GAASITLTV

SEQ ID NO: 20979 - protein, 9 aa, Artificial Sequence
  Description of Artificial Sequence: Synthetic peptide
VSSNWNRVL

SEQ ID NO: 20980 - protein, 9 aa, Artificial Sequence
  Description of Artificial Sequence: Synthetic peptide
NASWSNKSY

SEQ ID NO: 20981 - protein, 9 aa, Artificial Sequence
  Description of Artificial Sequence: Synthetic peptide
VSSHRARVF

SEQ ID NO: 20982 - protein, 9 aa, Artificial Sequence
  Description of Artificial Sequence: Synthetic peptide
VSSGIRKVL

SEQ ID NO: 20983 - protein, 9 aa, Artificial Sequence
  Description of Artificial Sequence: Synthetic peptide
ITNNAKNIL

SEQ ID NO: 20984 - protein, 10 aa, Artificial Sequence
  Description of Artificial Sequence: Synthetic peptide
IATDIQTREL

SEQ ID NO: 20985 - protein, 9 aa, Artificial Sequence
  Description of Artificial Sequence: Synthetic peptide
NASWSNKSY

SEQ ID NO: 20986 - protein, 9 aa, Artificial Sequence
  Description of Artificial Sequence: Synthetic peptide
KAIEAQQHL

SEQ ID NO: 20987 - protein, 9 aa, Artificial Sequence
  Description of Artificial Sequence: Synthetic peptide
NAKNIIVQL

SEQ ID NO: 20988 - protein, 9 aa, Artificial Sequence
  Description of Artificial Sequence: Synthetic peptide
VSSNWNRVL

SEQ ID NO: 20989 - protein, 9 aa, Artificial Sequence
  Description of Artificial Sequence: Synthetic peptide
NAKTIIVQL

SEQ ID NO: 20990 - protein, 10 aa, Artificial Sequence
  Description of Artificial Sequence: Synthetic peptide
IASDIQTKEL

SEQ ID NO: 20991 - protein, 9 aa, Artificial Sequence
  Description of Artificial Sequence: Synthetic peptide
SAKELIAEV

SEQ ID NO: 20992 - protein, 9 aa, Artificial Sequence
  Description of Artificial Sequence: Synthetic peptide
GAASIALTV

SEQ ID NO: 20993 - protein, 9 aa, Artificial Sequence
  Description of Artificial Sequence: Synthetic peptide
GAASIALTV

SEQ ID NO: 20994 - protein, 9 aa, Artificial Sequence
  Description of Artificial Sequence: Synthetic peptide
GAASITLTV

SEQ ID NO: 20995 - protein, 9 aa, Artificial Sequence
  Description of Artificial Sequence: Synthetic peptide
VETNSACAW

SEQ ID NO: 20996 - protein, 9 aa, Artificial Sequence
  Description of Artificial Sequence: Synthetic peptide
NATAIAVAA

SEQ ID NO: 20997 - protein, 11 aa, Artificial Sequence
  Description of Artificial Sequence: Synthetic peptide
QEVNIVTDSQY

SEQ ID NO: 20998 - protein, 11 aa, Artificial Sequence
  Description of Artificial Sequence: Synthetic peptide
AEQATQDVKNW

SEQ ID NO: 20999 - protein, 9 aa, Artificial Sequence
  Description of Artificial Sequence: Synthetic peptide
SAEPVPLQL

SEQ ID NO: 21000 - protein, 9 aa, Artificial Sequence
  Description of Artificial Sequence: Synthetic peptide
KALTDIVAL

SEQ ID NO: 21001 - protein, 10 aa, Artificial Sequence
  Description of Artificial Sequence: Synthetic peptide
RAVGIGAVFL

SEQ ID NO: 21002 - protein, 9 aa, Artificial Sequence
  Description of Artificial Sequence: Synthetic peptide
VAFIVAIFL

SEQ ID NO: 21003 - protein, 9 aa, Artificial Sequence
  Description of Artificial Sequence: Synthetic peptide
MIIGGLIGL

SEQ ID NO: 21004 - protein, 9 aa, Artificial Sequence
  Description of Artificial Sequence: Synthetic peptide
HTQVGSLQY

SEQ ID NO: 21005 - protein, 10 aa, Artificial Sequence
  Description of Artificial Sequence: Synthetic peptide
AADKGVSQNY

SEQ ID NO: 21006 - protein, 9 aa, Artificial Sequence
  Description of Artificial Sequence: Synthetic peptide
GSEEIKSLY

SEQ ID NO: 21007 - protein, 8 aa, Artificial Sequence
  Description of Artificial Sequence: Synthetic peptide
VLDVGDAY

SEQ ID NO: 21008 - protein, 10 aa, Artificial Sequence
  Description of Artificial Sequence: Synthetic peptide
VTVLDVGDAY

SEQ ID NO: 21009 - protein, 9 aa, Artificial Sequence
  Description of Artificial Sequence: Synthetic peptide
PTDPNPQEV

SEQ ID NO: 21010 - protein, 9 aa, Artificial Sequence
  Description of Artificial Sequence: Synthetic peptide
QLTEVVQKV

SEQ ID NO: 21011 - protein, 9 aa, Artificial Sequence
  Description of Artificial Sequence: Synthetic peptide
VLAEAMSQV

SEQ ID NO: 21012 - protein, 9 aa, Artificial Sequence
  Description of Artificial Sequence: Synthetic peptide
ILAEAMSQV

SEQ ID NO: 21013 - protein, 9 aa, Artificial Sequence
  Description of Artificial Sequence: Synthetic peptide
AVLSVVNRV

SEQ ID NO: 21014 - protein, 10 aa, Artificial Sequence
  Description of Artificial Sequence: Synthetic peptide
ALNPNLLETV

SEQ ID NO: 21015 - protein, 9 aa, Artificial Sequence
  Description of Artificial Sequence: Synthetic peptide
ILKEPVHGV

SEQ ID NO: 21016 - protein, 9 aa, Artificial Sequence
  Description of Artificial Sequence: Synthetic peptide
SLFNTVATL

SEQ ID NO: 21017 - protein, 9 aa, Artificial Sequence
  Description of Artificial Sequence: Synthetic peptide
GLADQLIHI

SEQ ID NO: 21018 - protein, 10 aa, Artificial Sequence
  Description of Artificial Sequence: Synthetic peptide
KLVPVDPAEV

SEQ ID NO: 21019 - protein, 9 aa, Artificial Sequence
  Description of Artificial Sequence: Synthetic peptide
QLTEAVQKI

SEQ ID NO: 21020 - protein, 9 aa, Artificial Sequence
  Description of Artificial Sequence: Synthetic peptide
NLLETVEGC

SEQ ID NO: 21021 - protein, 9 aa, Artificial Sequence
  Description of Artificial Sequence: Synthetic peptide
TVLSVVNRV

SEQ ID NO: 21022 - protein, 9 aa, Artificial Sequence
  Description of Artificial Sequence: Synthetic peptide
GLLETTEGC

SEQ ID NO: 21023 - protein, 9 aa, Artificial Sequence
  Description of Artificial Sequence: Synthetic peptide
ALTEICTEM

SEQ ID NO: 21024 - protein, 10 aa, Artificial Sequence
  Description of Artificial Sequence: Synthetic peptide
TLWQRPVVTV

SEQ ID NO: 21025 - protein, 8 aa, Artificial Sequence
  Description of Artificial Sequence: Synthetic peptide
ILGDINNL

SEQ ID NO: 21026 - protein, 9 aa, Artificial Sequence
  Description of Artificial Sequence: Synthetic peptide
IITQIQPSI

SEQ ID NO: 21027 - protein, 9 aa, Artificial Sequence
  Description of Artificial Sequence: Synthetic peptide
ALTDIVPLT

SEQ ID NO: 21028 - protein, 9 aa, Artificial Sequence
  Description of Artificial Sequence: Synthetic peptide
SINNETPGV

SEQ ID NO: 21029 - protein, 10 aa, Artificial Sequence
  Description of Artificial Sequence: Synthetic peptide
KLVPVDPREV

SEQ ID NO: 21030 - protein, 9 aa, Artificial Sequence
  Description of Artificial Sequence: Synthetic peptide
GLGSPQISV

SEQ ID NO: 21031 - protein, 9 aa, Artificial Sequence
  Description of Artificial Sequence: Synthetic peptide
IVTDSQYAL

SEQ ID NO: 21032 - protein, 9 aa, Artificial Sequence
  Description of Artificial Sequence: Synthetic peptide
VLAEAMSQV

SEQ ID NO: 21033 - protein, 9 aa, Artificial Sequence
  Description of Artificial Sequence: Synthetic peptide
ILAEAMSQV

SEQ ID NO: 21034 - protein, 9 aa, Artificial Sequence
  Description of Artificial Sequence: Synthetic peptide
ILKEPVHGV

SEQ ID NO: 21035 - protein, 9 aa, Artificial Sequence
  Description of Artificial Sequence: Synthetic peptide
QLTEVVQKV

SEQ ID NO: 21036 - protein, 9 aa, Artificial Sequence
  Description of Artificial Sequence: Synthetic peptide
SLFNTVATL

SEQ ID NO: 21037 - protein, 10 aa, Artificial Sequence
  Description of Artificial Sequence: Synthetic peptide
ALNPNLLETV

SEQ ID NO: 21038 - protein, 10 aa, Artificial Sequence
  Description of Artificial Sequence: Synthetic peptide
YLKDQQLLGI

SEQ ID NO: 21039 - protein, 10 aa, Artificial Sequence
  Description of Artificial Sequence: Synthetic peptide
YLRDQQLLGI

SEQ ID NO: 21040 - protein, 10 aa, Artificial Sequence
  Description of Artificial Sequence: Synthetic peptide
KLVPVDPREV

SEQ ID NO: 21041 - protein, 10 aa, Artificial Sequence
  Description of Artificial Sequence: Synthetic peptide
TLWQRPVVTV

SEQ ID NO: 21042 - protein, 9 aa, Artificial Sequence
  Description of Artificial Sequence: Synthetic peptide
AVLSVVNRV

SEQ ID NO: 21043 - protein, 8 aa, Artificial Sequence
  Description of Artificial Sequence: Synthetic peptide
VLSVVNRV

SEQ ID NO: 21044 - protein, 9 aa, Artificial Sequence
  Description of Artificial Sequence: Synthetic peptide
GAASITLTV

SEQ ID NO: 21045 - protein, 9 aa, Artificial Sequence
  Description of Artificial Sequence: Synthetic peptide
ALNPGLLET

SEQ ID NO: 21046 - protein, 11 aa, Artificial Sequence
  Description of Artificial Sequence: Synthetic peptide
FLKEKGGLDGL

SEQ ID NO: 21047 - protein, 9 aa, Artificial Sequence
  Description of Artificial Sequence: Synthetic peptide
QLTEAVQKI

SEQ ID NO: 21048 - protein, 9 aa, Artificial Sequence
  Description of Artificial Sequence: Synthetic peptide
KTKPPVPSV

SEQ ID NO: 21049 - protein, 9 aa, Artificial Sequence
  Description of Artificial Sequence: Synthetic peptide
SISERLLSA

SEQ ID NO: 21050 - protein, 10 aa, Artificial Sequence
  Description of Artificial Sequence: Synthetic peptide
KLVPVDPAEV

SEQ ID NO: 21051 - protein, 10 aa, Artificial Sequence
  Description of Artificial Sequence: Synthetic peptide
ALTDIVPLTA

SEQ ID NO: 21052 - protein, 9 aa, Artificial Sequence
  Description of Artificial Sequence: Synthetic peptide
ALSPRTLNA

SEQ ID NO: 21053 - protein, 10 aa, Artificial Sequence
  Description of Artificial Sequence: Synthetic peptide
GLIGLRIAFA

SEQ ID NO: 21054 - protein, 9 aa, Artificial Sequence
  Description of Artificial Sequence: Synthetic peptide
ELKKIIGQV

SEQ ID NO: 21055 - protein, 9 aa, Artificial Sequence
  Description of Artificial Sequence: Synthetic peptide
TVLSVVNRV

SEQ ID NO: 21056 - protein, 9 aa, Artificial Sequence
  Description of Artificial Sequence: Synthetic peptide
MIIGGLIGL

SEQ ID NO: 21057 - protein, 9 aa, Artificial Sequence
  Description of Artificial Sequence: Synthetic peptide
QLRARILAV

SEQ ID NO: 21058 - protein, 9 aa, Artificial Sequence
  Description of Artificial Sequence: Synthetic peptide
GLADQLIHI

SEQ ID NO: 21059 - protein, 9 aa, Artificial Sequence
  Description of Artificial Sequence: Synthetic peptide
ALFLGFLGA

SEQ ID NO: 21060 - protein, 10 aa, Artificial Sequence
  Description of Artificial Sequence: Synthetic peptide
ALFLGFLGAA

SEQ ID NO: 21061 - protein, 10 aa, Artificial Sequence
  Description of Artificial Sequence: Synthetic peptide
HLILGDINNL

SEQ ID NO: 21062 - protein, 9 aa, Artificial Sequence
  Description of Artificial Sequence: Synthetic peptide
ELRSLFNTV

SEQ ID NO: 21063 - protein, 9 aa, Artificial Sequence
  Description of Artificial Sequence: Synthetic peptide
SLYNTIAVL

SEQ ID NO: 21064 - protein, 9 aa, Artificial Sequence
  Description of Artificial Sequence: Synthetic peptide
LLNTTAIAV

SEQ ID NO: 21065 - protein, 9 aa, Artificial Sequence
  Description of Artificial Sequence: Synthetic peptide
QLTEVVQKV

SEQ ID NO: 21066 - protein, 9 aa, Artificial Sequence
  Description of Artificial Sequence: Synthetic peptide
SLFNTVATL

SEQ ID NO: 21067 - protein, 9 aa, Artificial Sequence
  Description of Artificial Sequence: Synthetic peptide
AVLSVVNRV

SEQ ID NO: 21068 - protein, 9 aa, Artificial Sequence
  Description of Artificial Sequence: Synthetic peptide
TVLSVVNRV

SEQ ID NO: 21069 - protein, 9 aa, Artificial Sequence
  Description of Artificial Sequence: Synthetic peptide
ILKEPVHGV

SEQ ID NO: 21070 - protein, 9 aa, Artificial Sequence
  Description of Artificial Sequence: Synthetic peptide
ILAIIVWTI

SEQ ID NO: 21071 - protein, 9 aa, Artificial Sequence
  Description of Artificial Sequence: Synthetic peptide
LILGNIDNL

SEQ ID NO: 21072 - protein, 9 aa, Artificial Sequence
  Description of Artificial Sequence: Synthetic peptide
LILGDINNL

SEQ ID NO: 21073 - protein, 10 aa, Artificial Sequence
  Description of Artificial Sequence: Synthetic peptide
ALNPNLLETV

SEQ ID NO: 21074 - protein, 9 aa, Artificial Sequence
  Description of Artificial Sequence: Synthetic peptide
GLADQLIHI

SEQ ID NO: 21075 - protein, 9 aa, Artificial Sequence
  Description of Artificial Sequence: Synthetic peptide
SLYNTIAVL

SEQ ID NO: 21076 - protein, 9 aa, Artificial Sequence
  Description of Artificial Sequence: Synthetic peptide
SLAISIVAL

SEQ ID NO: 21077 - protein, 9 aa, Artificial Sequence
  Description of Artificial Sequence: Synthetic peptide
TLNAWVKVI

SEQ ID NO: 21078 - protein, 9 aa, Artificial Sequence
  Description of Artificial Sequence: Synthetic peptide
ALFYRLDVL

SEQ ID NO: 21079 - protein, 9 aa, Artificial Sequence
  Description of Artificial Sequence: Synthetic peptide
LVNQIIEQL

SEQ ID NO: 21080 - protein, 9 aa, Artificial Sequence
  Description of Artificial Sequence: Synthetic peptide
MIIGGLIGL

SEQ ID NO: 21081 - protein, 9 aa, Artificial Sequence
  Description of Artificial Sequence: Synthetic peptide
ILAEAMSQV

SEQ ID NO: 21082 - protein, 10 aa, Artificial Sequence
  Description of Artificial Sequence: Synthetic peptide
TLWQRPVVTV

SEQ ID NO: 21083 - protein, 8 aa, Artificial Sequence
  Description of Artificial Sequence: Synthetic peptide
ILGDINNL

SEQ ID NO: 21084 - protein, 10 aa, Artificial Sequence
  Description of Artificial Sequence: Synthetic peptide
HLILGDINNL

SEQ ID NO: 21085 - protein, 10 aa, Artificial Sequence
  Description of Artificial Sequence: Synthetic peptide
HLILGNIDNL

SEQ ID NO: 21086 - protein, 9 aa, Artificial Sequence
  Description of Artificial Sequence: Synthetic peptide
HLEGKIILV

SEQ ID NO: 21087 - protein, 11 aa, Artificial Sequence
  Description of Artificial Sequence: Synthetic peptide
ALFYKLDIVQI

SEQ ID NO: 21088 - protein, 9 aa, Artificial Sequence
  Description of Artificial Sequence: Synthetic peptide
RVSALFYKL

SEQ ID NO: 21089 - protein, 9 aa, Artificial Sequence
  Description of Artificial Sequence: Synthetic peptide
ALTDIVPLT

SEQ ID NO: 21090 - protein, 11 aa, Artificial Sequence
  Description of Artificial Sequence: Synthetic peptide
ILYESNPYPNL

SEQ ID NO: 21091 - protein, 9 aa, Artificial Sequence
  Description of Artificial Sequence: Synthetic peptide
LLNTTAIAV

SEQ ID NO: 21092 - protein, 10 aa, Artificial Sequence
  Description of Artificial Sequence: Synthetic peptide
RTPDFWEVQL

SEQ ID NO: 21093 - protein, 9 aa, Artificial Sequence
  Description of Artificial Sequence: Synthetic peptide
VLAEAMSQV

SEQ ID NO: 21094 - protein, 10 aa, Artificial Sequence
  Description of Artificial Sequence: Synthetic peptide
KLVPVDPAEV

SEQ ID NO: 21095 - protein, 10 aa, Artificial Sequence
  Description of Artificial Sequence: Synthetic peptide
ALAWDDLRNL

SEQ ID NO: 21096 - protein, 10 aa, Artificial Sequence
  Description of Artificial Sequence: Synthetic peptide
TLWQRPIVTI

SEQ ID NO: 21097 - protein, 9 aa, Artificial Sequence
  Description of Artificial Sequence: Synthetic peptide
IVTDSQYAL

SEQ ID NO: 21098 - protein, 11 aa, Artificial Sequence
  Description of Artificial Sequence: Synthetic peptide
GLLTGERDWHL

SEQ ID NO: 21099 - protein, 8 aa, Artificial Sequence
  Description of Artificial Sequence: Synthetic peptide
ILGNIDNL

SEQ ID NO: 21100 - protein, 9 aa, Artificial Sequence
  Description of Artificial Sequence: Synthetic peptide
ALNPGLLET

SEQ ID NO: 21101 - protein, 9 aa, Artificial Sequence
  Description of Artificial Sequence: Synthetic peptide
WTIEILEEL

SEQ ID NO: 21102 - protein, 9 aa, Artificial Sequence
  Description of Artificial Sequence: Synthetic peptide
IITQIQPSI

SEQ ID NO: 21103 - protein, 9 aa, Artificial Sequence
  Description of Artificial Sequence: Synthetic peptide
LLQLTVWGI

SEQ ID NO: 21104 - protein, 9 aa, Artificial Sequence
  Description of Artificial Sequence: Synthetic peptide
NYSDTIYKL

SEQ ID NO: 21105 - protein, 9 aa, Artificial Sequence
  Description of Artificial Sequence: Synthetic peptide
YLWNLILYW

SEQ ID NO: 21106 - protein, 9 aa, Artificial Sequence
  Description of Artificial Sequence: Synthetic peptide
TLQEQIAWM

SEQ ID NO: 21107 - protein, 9 aa, Artificial Sequence
  Description of Artificial Sequence: Synthetic peptide
AIIRILQQL

SEQ ID NO: 21108 - protein, 11 aa, Artificial Sequence
  Description of Artificial Sequence: Synthetic peptide
VQLGIPHPAGL

SEQ ID NO: 21109 - protein, 10 aa, Artificial Sequence
  Description of Artificial Sequence: Synthetic peptide
RTQDFWEVQL

SEQ ID NO: 21110 - protein, 10 aa, Artificial Sequence
  Description of Artificial Sequence: Synthetic peptide
YLRDQQLLGI

SEQ ID NO: 21111 - protein, 9 aa, Artificial Sequence
  Description of Artificial Sequence: Synthetic peptide
SINNETPGV

SEQ ID NO: 21112 - protein, 9 aa, Artificial Sequence
  Description of Artificial Sequence: Synthetic peptide
TQVGSLQYL

SEQ ID NO: 21113 - protein, 10 aa, Artificial Sequence
  Description of Artificial Sequence: Synthetic peptide
KLVPVDPREV

SEQ ID NO: 21114 - protein, 9 aa, Artificial Sequence
  Description of Artificial Sequence: Synthetic peptide
TLQEQITWM

SEQ ID NO: 21115 - protein, 9 aa, Artificial Sequence
  Description of Artificial Sequence: Synthetic peptide
NTKNIIVQL

SEQ ID NO: 21116 - protein, 9 aa, Artificial Sequence
  Description of Artificial Sequence: Synthetic peptide
KLTPLCVTL

SEQ ID NO: 21117 - protein, 9 aa, Artificial Sequence
  Description of Artificial Sequence: Synthetic peptide
LILYWGQEI

SEQ ID NO: 21118 - protein, 9 aa, Artificial Sequence
  Description of Artificial Sequence: Synthetic peptide
QLTEVVQKV

SEQ ID NO: 21119 - protein, 9 aa, Artificial Sequence
  Description of Artificial Sequence: Synthetic peptide
TQVGSLQYL

SEQ ID NO: 21120 - protein, 9 aa, Artificial Sequence
  Description of Artificial Sequence: Synthetic peptide
LILGDINNL

SEQ ID NO: 21121 - protein, 9 aa, Artificial Sequence
  Description of Artificial Sequence: Synthetic peptide
VLAEAMSQV

SEQ ID NO: 21122 - protein, 9 aa, Artificial Sequence
  Description of Artificial Sequence: Synthetic peptide
ILAEAMSQV

SEQ ID NO: 21123 - protein, 9 aa, Artificial Sequence
  Description of Artificial Sequence: Synthetic peptide
AVLSVVNRV

SEQ ID NO: 21124 - protein, 9 aa, Artificial Sequence
  Description of Artificial Sequence: Synthetic peptide
AVAEGTDRI

SEQ ID NO: 21125 - protein, 9 aa, Artificial Sequence
  Description of Artificial Sequence: Synthetic peptide
TVLSVVNRV

SEQ ID NO: 21126 - protein, 11 aa, Artificial Sequence
  Description of Artificial Sequence: Synthetic peptide
TQVDPGLADQL

SEQ ID NO: 21127 - protein, 9 aa, Artificial Sequence
  Description of Artificial Sequence: Synthetic peptide
QISSISERL

SEQ ID NO: 21128 - protein, 9 aa, Artificial Sequence
  Description of Artificial Sequence: Synthetic peptide
LILGNIDNL

SEQ ID NO: 21129 - protein, 9 aa, Artificial Sequence
  Description of Artificial Sequence: Synthetic peptide
WTVNDIQKL

SEQ ID NO: 21130 - protein, 9 aa, Artificial Sequence
  Description of Artificial Sequence: Synthetic peptide
ATLEEMMTA

SEQ ID NO: 21131 - protein, 9 aa, Artificial Sequence
  Description of Artificial Sequence: Synthetic peptide
GAASITLTV

SEQ ID NO: 21132 - protein, 9 aa, Artificial Sequence
  Description of Artificial Sequence: Synthetic peptide
IVTDSQYAL

SEQ ID NO: 21133 - protein, 9 aa, Artificial Sequence
  Description of Artificial Sequence: Synthetic peptide
WTIEILEEL

SEQ ID NO: 21134 - protein, 9 aa, Artificial Sequence
  Description of Artificial Sequence: Synthetic peptide
SQSEIWENM

SEQ ID NO: 21135 - protein, 9 aa, Artificial Sequence
  Description of Artificial Sequence: Synthetic peptide
MIIGGLIGL

SEQ ID NO: 21136 - protein, 9 aa, Artificial Sequence
  Description of Artificial Sequence: Synthetic peptide
SLFNTVATL

SEQ ID NO: 21137 - protein, 9 aa, Artificial Sequence
  Description of Artificial Sequence: Synthetic peptide
VVIQDNSEI

SEQ ID NO: 21138 - protein, 9 aa, Artificial Sequence
  Description of Artificial Sequence: Synthetic peptide
LVNQIIEQL

SEQ ID NO: 21139 - protein, 11 aa, Artificial Sequence
  Description of Artificial Sequence: Synthetic peptide
TQVEPDLADQL

SEQ ID NO: 21140 - protein, 9 aa, Artificial Sequence
  Description of Artificial Sequence: Synthetic peptide
FTSAVVKAA

SEQ ID NO: 21141 - protein, 9 aa, Artificial Sequence
  Description of Artificial Sequence: Synthetic peptide
ASITLTVQA

SEQ ID NO: 21142 - protein, 10 aa, Artificial Sequence
  Description of Artificial Sequence: Synthetic peptide
SQYALGIIQA

SEQ ID NO: 21143 - protein, 9 aa, Artificial Sequence
  Description of Artificial Sequence: Synthetic peptide
NIIVQLNEA

SEQ ID NO: 21144 - protein, 10 aa, Artificial Sequence
  Description of Artificial Sequence: Synthetic peptide
REFSSEQTRA

SEQ ID NO: 21145 - protein, 9 aa, Artificial Sequence
  Description of Artificial Sequence: Synthetic peptide
SISERLLSA

SEQ ID NO: 21146 - protein, 9 aa, Artificial Sequence
  Description of Artificial Sequence: Synthetic peptide
SQVTNPVVM

SEQ ID NO: 21147 - protein, 9 aa, Artificial Sequence
  Description of Artificial Sequence: Synthetic peptide
SQIFPGIKV

SEQ ID NO: 21148 - protein, 9 aa, Artificial Sequence
  Description of Artificial Sequence: Synthetic peptide
NTSTITQTC

SEQ ID NO: 21149 - protein, 9 aa, Artificial Sequence
  Description of Artificial Sequence: Synthetic peptide
RAIEAQQHL

SEQ ID NO: 21150 - protein, 10 aa, Artificial Sequence
  Description of Artificial Sequence: Synthetic peptide
SSISERLLSA

SEQ ID NO: 21151 - protein, 9 aa, Artificial Sequence
  Description of Artificial Sequence: Synthetic peptide
QLTEAVQKI

SEQ ID NO: 21152 - protein, 11 aa, Artificial Sequence
  Description of Artificial Sequence: Synthetic peptide
VVIQDNSEIKV

SEQ ID NO: 21153 - protein, 10 aa, Artificial Sequence
  Description of Artificial Sequence: Synthetic peptide
HLILGDINNL

SEQ ID NO: 21154 - protein, 9 aa, Artificial Sequence
  Description of Artificial Sequence: Synthetic peptide
SQIYPGIKV

SEQ ID NO: 21155 - protein, 9 aa, Artificial Sequence
  Description of Artificial Sequence: Synthetic peptide
FTSTVVKAA

SEQ ID NO: 21156 - protein, 9 aa, Artificial Sequence
  Description of Artificial Sequence: Synthetic peptide
NTKNIIVQL

SEQ ID NO: 21157 - protein, 9 aa, Artificial Sequence
  Description of Artificial Sequence: Synthetic peptide
TETLLVQNA

SEQ ID NO: 21158 - protein, 9 aa, Artificial Sequence
  Description of Artificial Sequence: Synthetic peptide
IEVKDTKEA

SEQ ID NO: 21159 - protein, 9 aa, Artificial Sequence
  Description of Artificial Sequence: Synthetic peptide
LETEPIVGA

SEQ ID NO: 21160 - protein, 9 aa, Artificial Sequence
  Description of Artificial Sequence: Synthetic peptide
ILKEPVHGV

SEQ ID NO: 21161 - protein, 9 aa, Artificial Sequence
  Description of Artificial Sequence: Synthetic peptide
DIIGDIRQA

SEQ ID NO: 21162 - protein, 9 aa, Artificial Sequence
  Description of Artificial Sequence: Synthetic peptide
QLTEVVQKV

SEQ ID NO: 21163 - protein, 9 aa, Artificial Sequence
  Description of Artificial Sequence: Synthetic peptide
AVLSVVNRV

SEQ ID NO: 21164 - protein, 9 aa, Artificial Sequence
  Description of Artificial Sequence: Synthetic peptide
IVTDSQYAL

SEQ ID NO: 21165 - protein, 9 aa, Artificial Sequence
  Description of Artificial Sequence: Synthetic peptide
IQDNSEIKV

SEQ ID NO: 21166 - protein, 9 aa, Artificial Sequence
  Description of Artificial Sequence: Synthetic peptide
TVLSVVNRV

SEQ ID NO: 21167 - protein, 9 aa, Artificial Sequence
  Description of Artificial Sequence: Synthetic peptide
TQVGSLQYL

SEQ ID NO: 21168 - protein, 9 aa, Artificial Sequence
  Description of Artificial Sequence: Synthetic peptide
VLAEAMSQV

SEQ ID NO: 21169 - protein, 9 aa, Artificial Sequence
  Description of Artificial Sequence: Synthetic peptide
TVTQACPKV

SEQ ID NO: 21170 - protein, 9 aa, Artificial Sequence
  Description of Artificial Sequence: Synthetic peptide
ILAEAMSQV

SEQ ID NO: 21171 - protein, 11 aa, Artificial Sequence
  Description of Artificial Sequence: Synthetic peptide
TQVDPGLADQL

SEQ ID NO: 21172 - protein, 11 aa, Artificial Sequence
  Description of Artificial Sequence: Synthetic peptide
VVIQDNSEIKV

SEQ ID NO: 21173 - protein, 9 aa, Artificial Sequence
  Description of Artificial Sequence: Synthetic peptide
GGIGGFIKV

SEQ ID NO: 21174 - protein, 9 aa, Artificial Sequence
  Description of Artificial Sequence: Synthetic peptide
SQIYPGIKV

SEQ ID NO: 21175 - protein, 9 aa, Artificial Sequence
  Description of Artificial Sequence: Synthetic peptide
LILGDINNL

SEQ ID NO: 21176 - protein, 9 aa, Artificial Sequence
  Description of Artificial Sequence: Synthetic peptide
SQIFPGIKV

SEQ ID NO: 21177 - protein, 10 aa, Artificial Sequence
  Description of Artificial Sequence: Synthetic peptide
TVLDVGDAYF

SEQ ID NO: 21178 - protein, 9 aa, Artificial Sequence
  Description of Artificial Sequence: Synthetic peptide
MIIGGLIGL

SEQ ID NO: 21179 - protein, 11 aa, Artificial Sequence
  Description of Artificial Sequence: Synthetic peptide
TQVEPDLADQL

SEQ ID NO: 21180 - protein, 9 aa, Artificial Sequence
  Description of Artificial Sequence: Synthetic peptide
VVIQDNSEI

SEQ ID NO: 21181 - protein, 9 aa, Artificial Sequence
  Description of Artificial Sequence: Synthetic peptide
VQLNETVQI

SEQ ID NO: 21182 - protein, 9 aa, Artificial Sequence
  Description of Artificial Sequence: Synthetic peptide
LILGNIDNL

SEQ ID NO: 21183 - protein, 9 aa, Artificial Sequence
  Description of Artificial Sequence: Synthetic peptide
GAASITLTV

SEQ ID NO: 21184 - protein, 9 aa, Artificial Sequence
  Description of Artificial Sequence: Synthetic peptide
QLTEAVQKI

SEQ ID NO: 21185 - protein, 11 aa, Artificial Sequence
  Description of Artificial Sequence: Synthetic peptide
KTPPAADGVGA

SEQ ID NO: 21186 - protein, 9 aa, Artificial Sequence
  Description of Artificial Sequence: Synthetic peptide
YQLETEPIV

SEQ ID NO: 21187 - protein, 9 aa, Artificial Sequence
  Description of Artificial Sequence: Synthetic peptide
WTIEILEEL

SEQ ID NO: 21188 - protein, 9 aa, Artificial Sequence
  Description of Artificial Sequence: Synthetic peptide
IITQIQPSI

SEQ ID NO: 21189 - protein, 9 aa, Artificial Sequence
  Description of Artificial Sequence: Synthetic peptide
NIIVQLNEA

SEQ ID NO: 21190 - protein, 9 aa, Artificial Sequence
  Description of Artificial Sequence: Synthetic peptide
AVAEGTDRI

SEQ ID NO: 21191 - protein, 9 aa, Artificial Sequence
  Description of Artificial Sequence: Synthetic peptide
KTPPAADGV

SEQ ID NO: 21192 - protein, 9 aa, Artificial Sequence
  Description of Artificial Sequence: Synthetic peptide
LVPVDPAEV

SEQ ID NO: 21193 - protein, 9 aa, Artificial Sequence
  Description of Artificial Sequence: Synthetic peptide
YVDRFFKTL

SEQ ID NO: 21194 - protein, 9 aa, Artificial Sequence
  Description of Artificial Sequence: Synthetic peptide
QLTEVVQKV

SEQ ID NO: 21195 - protein, 9 aa, Artificial Sequence
  Description of Artificial Sequence: Synthetic peptide
AVLSVVNRV

SEQ ID NO: 21196 - protein, 9 aa, Artificial Sequence
  Description of Artificial Sequence: Synthetic peptide
TVLSVVNRV

SEQ ID NO: 21197 - protein, 9 aa, Artificial Sequence
  Description of Artificial Sequence: Synthetic peptide
ILKEPVHGV

SEQ ID NO: 21198 - protein, 9 aa, Artificial Sequence
  Description of Artificial Sequence: Synthetic peptide
YVDRFFRVL

SEQ ID NO: 21199 - protein, 9 aa, Artificial Sequence
  Description of Artificial Sequence: Synthetic peptide
ILAEAMSQV

SEQ ID NO: 21200 - protein, 9 aa, Artificial Sequence
  Description of Artificial Sequence: Synthetic peptide
FSPEVIPMF

SEQ ID NO: 21201 - protein, 9 aa, Artificial Sequence
  Description of Artificial Sequence: Synthetic peptide
VLAEAMSQV

SEQ ID NO: 21202 - protein, 9 aa, Artificial Sequence
  Description of Artificial Sequence: Synthetic peptide
HLEGKIILV

SEQ ID NO: 21203 - protein, 10 aa, Artificial Sequence
  Description of Artificial Sequence: Synthetic peptide
TLWQRPVVTV

SEQ ID NO: 21204 - protein, 9 aa, Artificial Sequence
  Description of Artificial Sequence: Synthetic peptide
NADKLWVTV

SEQ ID NO: 21205 - protein, 9 aa, Artificial Sequence
  Description of Artificial Sequence: Synthetic peptide
YSDTIYKLI

SEQ ID NO: 21206 - protein, 9 aa, Artificial Sequence
  Description of Artificial Sequence: Synthetic peptide
QLTEVVQKV

SEQ ID NO: 21207 - protein, 9 aa, Artificial Sequence
  Description of Artificial Sequence: Synthetic peptide
KVISITETT

SEQ ID NO: 21208 - protein, 9 aa, Artificial Sequence
  Description of Artificial Sequence: Synthetic peptide
KVVSITETT

SEQ ID NO: 21209 - protein, 9 aa, Artificial Sequence
  Description of Artificial Sequence: Synthetic peptide
KTPPAADGV

SEQ ID NO: 21210 - protein, 9 aa, Artificial Sequence
  Description of Artificial Sequence: Synthetic peptide
AVLSVVNRV

SEQ ID NO: 21211 - protein, 10 aa, Artificial Sequence
  Description of Artificial Sequence: Synthetic peptide
KQISSISERL

SEQ ID NO: 21212 - protein, 9 aa, Artificial Sequence
  Description of Artificial Sequence: Synthetic peptide
WTVNDIQKL

SEQ ID NO: 21213 - protein, 9 aa, Artificial Sequence
  Description of Artificial Sequence: Synthetic peptide
KTKPPVPSV

SEQ ID NO: 21214 - protein, 9 aa, Artificial Sequence
  Description of Artificial Sequence: Synthetic peptide
ILAEAMSQV

SEQ ID NO: 21215 - protein, 9 aa, Artificial Sequence
  Description of Artificial Sequence: Synthetic peptide
AIIRILQQL

SEQ ID NO: 21216 - protein, 10 aa, Artificial Sequence
  Description of Artificial Sequence: Synthetic peptide
KQLTEVVQKV

SEQ ID NO: 21217 - protein, 11 aa, Artificial Sequence
  Description of Artificial Sequence: Synthetic peptide
KTPPAADGVGA

SEQ ID NO: 21218 - protein, 9 aa, Artificial Sequence
  Description of Artificial Sequence: Synthetic peptide
MIIGGLIGL

SEQ ID NO: 21219 - protein, 9 aa, Artificial Sequence
  Description of Artificial Sequence: Synthetic peptide
TQVGSLQYL

SEQ ID NO: 21220 - protein, 9 aa, Artificial Sequence
  Description of Artificial Sequence: Synthetic peptide
VLAEAMSQV

SEQ ID NO: 21221 - protein, 9 aa, Artificial Sequence
  Description of Artificial Sequence: Synthetic peptide
LILGDINNL

SEQ ID NO: 21222 - protein, 10 aa, Artificial Sequence
  Description of Artificial Sequence: Synthetic peptide
KAYETEVHNV

SEQ ID NO: 21223 - protein, 10 aa, Artificial Sequence
  Description of Artificial Sequence: Synthetic peptide
RVLAEAMSQV

SEQ ID NO: 21224 - protein, 10 aa, Artificial Sequence
  Description of Artificial Sequence: Synthetic peptide
KLVPVDPAEV

SEQ ID NO: 21225 - protein, 9 aa, Artificial Sequence
  Description of Artificial Sequence: Synthetic peptide
IITQIQPSI

SEQ ID NO: 21226 - protein, 9 aa, Artificial Sequence
  Description of Artificial Sequence: Synthetic peptide
TVLSVVNRV

SEQ ID NO: 21227 - protein, 9 aa, Artificial Sequence
  Description of Artificial Sequence: Synthetic peptide
LETEPIVGA

SEQ ID NO: 21228 - protein, 10 aa, Artificial Sequence
  Description of Artificial Sequence: Synthetic peptide
HLILGDINNL

SEQ ID NO: 21229 - protein, 9 aa, Artificial Sequence
  Description of Artificial Sequence: Synthetic peptide
IEVKDTKEA

SEQ ID NO: 21230 - protein, 9 aa, Artificial Sequence
  Description of Artificial Sequence: Synthetic peptide
IVQQQNNLL

SEQ ID NO: 21231 - protein, 9 aa, Artificial Sequence
  Description of Artificial Sequence: Synthetic peptide
ILKEPVHGV

SEQ ID NO: 21232 - protein, 9 aa, Artificial Sequence
  Description of Artificial Sequence: Synthetic peptide
FTSAVVKAA

SEQ ID NO: 21233 - protein, 9 aa, Artificial Sequence
  Description of Artificial Sequence: Synthetic peptide
FTSTVVKAA

SEQ ID NO: 21234 - protein, 9 aa, Artificial Sequence
  Description of Artificial Sequence: Synthetic peptide
QIYPGIKVK

SEQ ID NO: 21235 - protein, 10 aa, Artificial Sequence
  Description of Artificial Sequence: Synthetic peptide
VTNPVVMMQK

SEQ ID NO: 21236 - protein, 9 aa, Artificial Sequence
  Description of Artificial Sequence: Synthetic peptide
QIFPGIKVK

SEQ ID NO: 21237 - protein, 9 aa, Artificial Sequence
  Description of Artificial Sequence: Synthetic peptide
RTTTPYASK

SEQ ID NO: 21238 - protein, 11 aa, Artificial Sequence
  Description of Artificial Sequence: Synthetic peptide
KTKPPVPSVQK

SEQ ID NO: 21239 - protein, 9 aa, Artificial Sequence
  Description of Artificial Sequence: Synthetic peptide
AVRKAILGH

SEQ ID NO: 21240 - protein, 10 aa, Artificial Sequence
  Description of Artificial Sequence: Synthetic peptide
GTNFTSTVVK

SEQ ID NO: 21241 - protein, 10 aa, Artificial Sequence
  Description of Artificial Sequence: Synthetic peptide
VTNSAVMMQR

SEQ ID NO: 21242 - protein, 9 aa, Artificial Sequence
  Description of Artificial Sequence: Synthetic peptide
AIFQHSMTK

SEQ ID NO: 21243 - protein, 10 aa, Artificial Sequence
  Description of Artificial Sequence: Synthetic peptide
TVYYGVPVWK

SEQ ID NO: 21244 - protein, 11 aa, Artificial Sequence
  Description of Artificial Sequence: Synthetic peptide
TVNDIQKLVGK

SEQ ID NO: 21245 - protein, 9 aa, Artificial Sequence
  Description of Artificial Sequence: Synthetic peptide
STITQTCPK

SEQ ID NO: 21246 - protein, 9 aa, Artificial Sequence
  Description of Artificial Sequence: Synthetic peptide
ALTALIAPK

SEQ ID NO: 21247 - protein, 10 aa, Artificial Sequence
  Description of Artificial Sequence: Synthetic peptide
SLFGNDPLSQ

SEQ ID NO: 21248 - protein, 10 aa, Artificial Sequence
  Description of Artificial Sequence: Synthetic peptide
VTNPVVMMQK

SEQ ID NO: 21249 - protein, 11 aa, Artificial Sequence
  Description of Artificial Sequence: Synthetic peptide
TVNDIQKLVGK

SEQ ID NO: 21250 - protein, 9 aa, Artificial Sequence
  Description of Artificial Sequence: Synthetic peptide
QIYPGIKVK

SEQ ID NO: 21251 - protein, 10 aa, Artificial Sequence
  Description of Artificial Sequence: Synthetic peptide
GTNFTSTVVK

SEQ ID NO: 21252 - protein, 11 aa, Artificial Sequence
  Description of Artificial Sequence: Synthetic peptide
VVSITETTNQK

SEQ ID NO: 21253 - protein, 10 aa, Artificial Sequence
  Description of Artificial Sequence: Synthetic peptide
GSNFTSAVVK

SEQ ID NO: 21254 - protein, 9 aa, Artificial Sequence
  Description of Artificial Sequence: Synthetic peptide
GLDGLIYSK

SEQ ID NO: 21255 - protein, 9 aa, Artificial Sequence
  Description of Artificial Sequence: Synthetic peptide
RTTTPYASK

SEQ ID NO: 21256 - protein, 10 aa, Artificial Sequence
  Description of Artificial Sequence: Synthetic peptide
TVQPIQLPDK

SEQ ID NO: 21257 - protein, 9 aa, Artificial Sequence
  Description of Artificial Sequence: Synthetic peptide
QIFPGIKVK

SEQ ID NO: 21258 - protein, 11 aa, Artificial Sequence
  Description of Artificial Sequence: Synthetic peptide
QVTNPVVMMQK

SEQ ID NO: 21259 - protein, 9 aa, Artificial Sequence
  Description of Artificial Sequence: Synthetic peptide
APAGFAILK

SEQ ID NO: 21260 - protein, 9 aa, Artificial Sequence
  Description of Artificial Sequence: Synthetic peptide
ALTALIAPK

SEQ ID NO: 21261 - protein, 9 aa, Artificial Sequence
  Description of Artificial Sequence: Synthetic peptide
KQLTEVVQK

SEQ ID NO: 21262 - protein, 11 aa, Artificial Sequence
  Description of Artificial Sequence: Synthetic peptide
KTKPPVPSVQK

SEQ ID NO: 21263 - protein, 11 aa, Artificial Sequence
  Description of Artificial Sequence: Synthetic peptide
QSQGVVESMNK

SEQ ID NO: 21264 - protein, 9 aa, Artificial Sequence
  Description of Artificial Sequence: Synthetic peptide
SNFTSAVVK

SEQ ID NO: 21265 - protein, 9 aa, Artificial Sequence
  Description of Artificial Sequence: Synthetic peptide
ASDAKAYEK

SEQ ID NO: 21266 - protein, 9 aa, Artificial Sequence
  Description of Artificial Sequence: Synthetic peptide
STITQTCPK

SEQ ID NO: 21267 - protein, 9 aa, Artificial Sequence
  Description of Artificial Sequence: Synthetic peptide
SITETTNQK

SEQ ID NO: 21268 - protein, 9 aa, Artificial Sequence
  Description of Artificial Sequence: Synthetic peptide
IIATDIQTK

SEQ ID NO: 21269 - protein, 10 aa, Artificial Sequence
  Description of Artificial Sequence: Synthetic peptide
VTNSAVMMQR

SEQ ID NO: 21270 - protein, 11 aa, Artificial Sequence
  Description of Artificial Sequence: Synthetic peptide
VISITETTNQK

SEQ ID NO: 21271 - protein, 9 aa, Artificial Sequence
  Description of Artificial Sequence: Synthetic peptide
KQLTEAVQK

SEQ ID NO: 21272 - protein, 11 aa, Artificial Sequence
  Description of Artificial Sequence: Synthetic peptide
ATDIQTKELQK

SEQ ID NO: 21273 - protein, 9 aa, Artificial Sequence
  Description of Artificial Sequence: Synthetic peptide
AIFQHSMTK

SEQ ID NO: 21274 - protein, 10 aa, Artificial Sequence
  Description of Artificial Sequence: Synthetic peptide
VVESMNKELK

SEQ ID NO: 21275 - protein, 10 aa, Artificial Sequence
  Description of Artificial Sequence: Synthetic peptide
VTNPVVMMQK

SEQ ID NO: 21276 - protein, 10 aa, Artificial Sequence
  Description of Artificial Sequence: Synthetic peptide
GTNFTSTVVK

SEQ ID NO: 21277 - protein, 9 aa, Artificial Sequence
  Description of Artificial Sequence: Synthetic peptide
STITQTCPK

SEQ ID NO: 21278 - protein, 9 aa, Artificial Sequence
  Description of Artificial Sequence: Synthetic peptide
QIYPGIKVK

SEQ ID NO: 21279 - protein, 10 aa, Artificial Sequence
  Description of Artificial Sequence: Synthetic peptide
GSNFTSAVVK

SEQ ID NO: 21280 - protein, 11 aa, Artificial Sequence
  Description of Artificial Sequence: Synthetic peptide
TVNDIQKLVGK

SEQ ID NO: 21281 - protein, 9 aa, Artificial Sequence
  Description of Artificial Sequence: Synthetic peptide
APAGFAILK

SEQ ID NO: 21282 - protein, 9 aa, Artificial Sequence
  Description of Artificial Sequence: Synthetic peptide
QIFPGIKVK

SEQ ID NO: 21283 - protein, 10 aa, Artificial Sequence
  Description of Artificial Sequence: Synthetic peptide
VTNSAVMMQR

SEQ ID NO: 21284 - protein, 9 aa, Artificial Sequence
  Description of Artificial Sequence: Synthetic peptide
ASDAKAYEK

SEQ ID NO: 21285 - protein, 9 aa, Artificial Sequence
  Description of Artificial Sequence: Synthetic peptide
STVTQACPK

SEQ ID NO: 21286 - protein, 9 aa, Artificial Sequence
  Description of Artificial Sequence: Synthetic peptide
RTTTPYASK

SEQ ID NO: 21287 - protein, 11 aa, Artificial Sequence
  Description of Artificial Sequence: Synthetic peptide
ATDIQTKELQK

SEQ ID NO: 21288 - protein, 10 aa, Artificial Sequence
  Description of Artificial Sequence: Synthetic peptide
GGLDGLIYSK

SEQ ID NO: 21289 - protein, 9 aa, Artificial Sequence
  Description of Artificial Sequence: Synthetic peptide
AVLYFVHQK

SEQ ID NO: 21290 - protein, 9 aa, Artificial Sequence
  Description of Artificial Sequence: Synthetic peptide
SNFTSAVVK

SEQ ID NO: 21291 - protein, 9 aa, Artificial Sequence
  Description of Artificial Sequence: Synthetic peptide
SITETTNQK

SEQ ID NO: 21292 - protein, 9 aa, Artificial Sequence
  Description of Artificial Sequence: Synthetic peptide
GNYSDTIYK

SEQ ID NO: 21293 - protein, 11 aa, Artificial Sequence
  Description of Artificial Sequence: Synthetic peptide
QVTNPVVMMQK

SEQ ID NO: 21294 - protein, 10 aa, Artificial Sequence
  Description of Artificial Sequence: Synthetic peptide
VSITETTNQK

SEQ ID NO: 21295 - protein, 9 aa, Artificial Sequence
  Description of Artificial Sequence: Synthetic peptide
QIIEQLIKK

SEQ ID NO: 21296 - protein, 9 aa, Artificial Sequence
  Description of Artificial Sequence: Synthetic peptide
KQLTEVVQK

SEQ ID NO: 21297 - protein, 10 aa, Artificial Sequence
  Description of Artificial Sequence: Synthetic peptide
ATEGIVIWGK

SEQ ID NO: 21298 - protein, 10 aa, Artificial Sequence
  Description of Artificial Sequence: Synthetic peptide
SQIYPGIKVK

SEQ ID NO: 21299 - protein, 9 aa, Artificial Sequence
  Description of Artificial Sequence: Synthetic peptide
LTALIAPKK

SEQ ID NO: 21300 - protein, 11 aa, Artificial Sequence
  Description of Artificial Sequence: Synthetic peptide
GVVESMNKELK

SEQ ID NO: 21301 - protein, 11 aa, Artificial Sequence
  Description of Artificial Sequence: Synthetic peptide
QVTNSAVMMQR

SEQ ID NO: 21302 - protein, 9 aa, Artificial Sequence
  Description of Artificial Sequence: Synthetic peptide
GLDGLIYSK

SEQ ID NO: 21303 - protein, 10 aa, Artificial Sequence
  Description of Artificial Sequence: Synthetic peptide
ISITETTNQK

SEQ ID NO: 21304 - protein, 10 aa, Artificial Sequence
  Description of Artificial Sequence: Synthetic peptide
SVLSGGKLDK

SEQ ID NO: 21305 - protein, 9 aa, Artificial Sequence
  Description of Artificial Sequence: Synthetic peptide
ALTALIAPK

SEQ ID NO: 21306 - protein, 11 aa, Artificial Sequence
  Description of Artificial Sequence: Synthetic peptide
YVDGAAHRETK

SEQ ID NO: 21307 - protein, 11 aa, Artificial Sequence
  Description of Artificial Sequence: Synthetic peptide
KTKPPVPSVQK

SEQ ID NO: 21308 - protein, 11 aa, Artificial Sequence
  Description of Artificial Sequence: Synthetic peptide
VVSITETTNQK

SEQ ID NO: 21309 - protein, 9 aa, Artificial Sequence
  Description of Artificial Sequence: Synthetic peptide
AIFQHSMTK

SEQ ID NO: 21310 - protein, 9 aa, Artificial Sequence
  Description of Artificial Sequence: Synthetic peptide
NYSDTIYKL

SEQ ID NO: 21311 - protein, 9 aa, Artificial Sequence
  Description of Artificial Sequence: Synthetic peptide
YETEVHNVW

SEQ ID NO: 21312 - protein, 9 aa, Artificial Sequence
  Description of Artificial Sequence: Synthetic peptide
VLENVTENF

SEQ ID NO: 21313 - protein, 9 aa, Artificial Sequence
  Description of Artificial Sequence: Synthetic peptide
RYLKDQQLL

SEQ ID NO: 21314 - protein, 9 aa, Artificial Sequence
  Description of Artificial Sequence: Synthetic peptide
FYKLDIVQI

SEQ ID NO: 21315 - protein, 9 aa, Artificial Sequence
  Description of Artificial Sequence: Synthetic peptide
RYLRDQQLL

SEQ ID NO: 21316 - protein, 9 aa, Artificial Sequence
  Description of Artificial Sequence: Synthetic peptide
IYQEPYKNL

SEQ ID NO: 21317 - protein, 9 aa, Artificial Sequence
  Description of Artificial Sequence: Synthetic peptide
KYLWNLVQY

SEQ ID NO: 21318 - protein, 9 aa, Artificial Sequence
  Description of Artificial Sequence: Synthetic peptide
NYSDTIYKL

SEQ ID NO: 21319 - protein, 9 aa, Artificial Sequence
  Description of Artificial Sequence: Synthetic peptide
FYKLDIVQI

SEQ ID NO: 21320 - protein, 9 aa, Artificial Sequence
  Description of Artificial Sequence: Synthetic peptide
RYLKDQQLL

SEQ ID NO: 21321 - protein, 9 aa, Artificial Sequence
  Description of Artificial Sequence: Synthetic peptide
IYQEPYKNL

SEQ ID NO: 21322 - protein, 9 aa, Artificial Sequence
  Description of Artificial Sequence: Synthetic peptide
RYLRDQQLL

SEQ ID NO: 21323 - protein, 9 aa, Artificial Sequence
  Description of Artificial Sequence: Synthetic peptide
YYDPSKDLI

SEQ ID NO: 21324 - protein, 10 aa, Artificial Sequence
  Description of Artificial Sequence: Synthetic peptide
DTINEEAAEW

SEQ ID NO: 21325 - protein, 10 aa, Artificial Sequence
  Description of Artificial Sequence: Synthetic peptide
DTINDEAAEW

SEQ ID NO: 21326 - protein, 9 aa, Artificial Sequence
  Description of Artificial Sequence: Synthetic peptide
EVIPMFSAL

SEQ ID NO: 21327 - protein, 9 aa, Artificial Sequence
  Description of Artificial Sequence: Synthetic peptide
EVIPMFTAL

SEQ ID NO: 21328 - protein, 10 aa, Artificial Sequence
  Description of Artificial Sequence: Synthetic peptide
EISNHTSTIY

SEQ ID NO: 21329 - protein, 9 aa, Artificial Sequence
  Description of Artificial Sequence: Synthetic peptide
DIAGTTSTL

SEQ ID NO: 21330 - protein, 9 aa, Artificial Sequence
  Description of Artificial Sequence: Synthetic peptide
EQSPPLTSL

SEQ ID NO: 21331 - protein, 9 aa, Artificial Sequence
  Description of Artificial Sequence: Synthetic peptide
NVTENFNMW

SEQ ID NO: 21332 - protein, 10 aa, Artificial Sequence
  Description of Artificial Sequence: Synthetic peptide
EIQKQGHGQW

SEQ ID NO: 21333 - protein, 10 aa, Artificial Sequence
  Description of Artificial Sequence: Synthetic peptide
EVNIVTDSQY

SEQ ID NO: 21334 - protein, 9 aa, Artificial Sequence
  Description of Artificial Sequence: Synthetic peptide
ETKQGKAGY

SEQ ID NO: 21335 - protein, 10 aa, Artificial Sequence
  Description of Artificial Sequence: Synthetic peptide
EVNIVTDSQY

SEQ ID NO: 21336 - protein, 9 aa, Artificial Sequence
  Description of Artificial Sequence: Synthetic peptide
EVIPMFSAL

SEQ ID NO: 21337 - protein, 11 aa, Artificial Sequence
  Description of Artificial Sequence: Synthetic peptide
EAADKGVSQNY

SEQ ID NO: 21338 - protein, 9 aa, Artificial Sequence
  Description of Artificial Sequence: Synthetic peptide
EVIPMFTAL

SEQ ID NO: 21339 - protein, 9 aa, Artificial Sequence
  Description of Artificial Sequence: Synthetic peptide
ETPGIRYQY

SEQ ID NO: 21340 - protein, 9 aa, Artificial Sequence
  Description of Artificial Sequence: Synthetic peptide
ETPGVRYQY

SEQ ID NO: 21341 - protein, 10 aa, Artificial Sequence
  Description of Artificial Sequence: Synthetic peptide
EVIPAETGQE

SEQ ID NO: 21342 - protein, 10 aa, Artificial Sequence
  Description of Artificial Sequence: Synthetic peptide
EISNHTSTIY

SEQ ID NO: 21343 - protein, 9 aa, Artificial Sequence
  Description of Artificial Sequence: Synthetic peptide
DIIGDIRQA

SEQ ID NO: 21344 - protein, 10 aa, Artificial Sequence
  Description of Artificial Sequence: Synthetic peptide
ETFRPGGGDM

SEQ ID NO: 21345 - protein, 9 aa, Artificial Sequence
  Description of Artificial Sequence: Synthetic peptide
EVIPAETGQ

SEQ ID NO: 21346 - protein, 9 aa, Artificial Sequence
  Description of Artificial Sequence: Synthetic peptide
ETKKGRAGY

SEQ ID NO: 21347 - protein, 9 aa, Artificial Sequence
  Description of Artificial Sequence: Synthetic peptide
EVIPMFSAL

SEQ ID NO: 21348 - protein, 9 aa, Artificial Sequence
  Description of Artificial Sequence: Synthetic peptide
EVIPMFTAL

SEQ ID NO: 21349 - protein, 10 aa, Artificial Sequence
  Description of Artificial Sequence: Synthetic peptide
EVNIVTDSQY

SEQ ID NO: 21350 - protein, 9 aa, Artificial Sequence
  Description of Artificial Sequence: Synthetic peptide
DIAGTTSTL

SEQ ID NO: 21351 - protein, 9 aa, Artificial Sequence
  Description of Artificial Sequence: Synthetic peptide
EQSPPLTSL

SEQ ID NO: 21352 - protein, 10 aa, Artificial Sequence
  Description of Artificial Sequence: Synthetic peptide
EISNHTSTIY

SEQ ID NO: 21353 - protein, 11 aa, Artificial Sequence
  Description of Artificial Sequence: Synthetic peptide
EAADKGVSQNY

SEQ ID NO: 21354 - protein, 9 aa, Artificial Sequence
  Description of Artificial Sequence: Synthetic peptide
EVIPMFTAL

SEQ ID NO: 21355 - protein, 9 aa, Artificial Sequence
  Description of Artificial Sequence: Synthetic peptide
EVIPMFSAL

SEQ ID NO: 21356 - protein, 9 aa, Artificial Sequence
  Description of Artificial Sequence: Synthetic peptide
DIIGDIRQA

SEQ ID NO: 21357 - protein, 9 aa, Artificial Sequence
  Description of Artificial Sequence: Synthetic peptide
ETVQINCTR

SEQ ID NO: 21358 - protein, 9 aa, Artificial Sequence
  Description of Artificial Sequence: Synthetic peptide
EAVEINCTR

SEQ ID NO: 21359 - protein, 9 aa, Artificial Sequence
  Description of Artificial Sequence: Synthetic peptide
DIAGTTSTL

SEQ ID NO: 21360 - protein, 9 aa, Artificial Sequence
  Description of Artificial Sequence: Synthetic peptide
MVHQALSPR

SEQ ID NO: 21361 - protein, 9 aa, Artificial Sequence
  Description of Artificial Sequence: Synthetic peptide
LFNTVATLY

SEQ ID NO: 21362 - protein, 9 aa, Artificial Sequence
  Description of Artificial Sequence: Synthetic peptide
TVLDVGDAY

SEQ ID NO: 21363 - protein, 10 aa, Artificial Sequence
  Description of Artificial Sequence: Synthetic peptide
VTFEPIPIHY

SEQ ID NO: 21364 - protein, 9 aa, Artificial Sequence
  Description of Artificial Sequence: Synthetic peptide
LYNTIAVLY

SEQ ID NO: 21365 - protein, 9 aa, Artificial Sequence
  Description of Artificial Sequence: Synthetic peptide
SFEPIPIHY

SEQ ID NO: 21366 - protein, 9 aa, Artificial Sequence
  Description of Artificial Sequence: Synthetic peptide
TFEPIPIHY

SEQ ID NO: 21367 - protein, 9 aa, Artificial Sequence
  Description of Artificial Sequence: Synthetic peptide
LFNTVATLY

SEQ ID NO: 21368 - protein, 9 aa, Artificial Sequence
  Description of Artificial Sequence: Synthetic peptide
GFFPDWQNY

SEQ ID NO: 21369 - protein, 9 aa, Artificial Sequence
  Description of Artificial Sequence: Synthetic peptide
SFEPIPIHY

SEQ ID NO: 21370 - protein, 10 aa, Artificial Sequence
  Description of Artificial Sequence: Synthetic peptide
VTFEPIPIHY

SEQ ID NO: 21371 - protein, 9 aa, Artificial Sequence
  Description of Artificial Sequence: Synthetic peptide
LYNTIAVLY

SEQ ID NO: 21372 - protein, 9 aa, Artificial Sequence
  Description of Artificial Sequence: Synthetic peptide
TFEPIPIHY

SEQ ID NO: 21373 - protein, 9 aa, Artificial Sequence
  Description of Artificial Sequence: Synthetic peptide
NNLWVTVYY

SEQ ID NO: 21374 - protein, 9 aa, Artificial Sequence
  Description of Artificial Sequence: Synthetic peptide
HMGPGKAFY

SEQ ID NO: 21375 - protein, 9 aa, Artificial Sequence
  Description of Artificial Sequence: Synthetic peptide
VWTIVYIEY

SEQ ID NO: 21376 - protein, 9 aa, Artificial Sequence
  Description of Artificial Sequence: Synthetic peptide
TVLDVGDAY

SEQ ID NO: 21377 - protein, 9 aa, Artificial Sequence
  Description of Artificial Sequence: Synthetic peptide
KTKPPVPSV

SEQ ID NO: 21378 - protein, 10 aa, Artificial Sequence
  Description of Artificial Sequence: Synthetic peptide
QEQGPPLTSL

SEQ ID NO: 21379 - protein, 9 aa, Artificial Sequence
  Description of Artificial Sequence: Synthetic peptide
YESNPYPNL

SEQ ID NO: 21380 - protein, 10 aa, Artificial Sequence
  Description of Artificial Sequence: Synthetic peptide
KEQSPPLTSL

SEQ ID NO: 21381 - protein, 9 aa, Artificial Sequence
  Description of Artificial Sequence: Synthetic peptide
TEVVQKVAM

SEQ ID NO: 21382 - protein, 9 aa, Artificial Sequence
  Description of Artificial Sequence: Synthetic peptide
YETEVHNVW

SEQ ID NO: 21383 - protein, 10 aa, Artificial Sequence
  Description of Artificial Sequence: Synthetic peptide
NERSGTGSSF

SEQ ID NO: 21384 - protein, 9 aa, Artificial Sequence
  Description of Artificial Sequence: Synthetic peptide
ISNHTSTIY

SEQ ID NO: 21385 - protein, 11 aa, Artificial Sequence
  Description of Artificial Sequence: Synthetic peptide
QTGSEEIKSLY

SEQ ID NO: 21386 - protein, 9 aa, Artificial Sequence
  Description of Artificial Sequence: Synthetic peptide
TVLDVGDAY

SEQ ID NO: 21387 - protein, 9 aa, Artificial Sequence
  Description of Artificial Sequence: Synthetic peptide
LGQHIYTTY

SEQ ID NO: 21388 - protein, 10 aa, Artificial Sequence
  Description of Artificial Sequence: Synthetic peptide
ILKEPVHGVY

SEQ ID NO: 21389 - protein, 9 aa, Artificial Sequence
  Description of Artificial Sequence: Synthetic peptide
KAQEEHEKY

SEQ ID NO: 21390 - protein, 10 aa, Artificial Sequence
  Description of Artificial Sequence: Synthetic peptide
GLADQLIHIY

SEQ ID NO: 21391 - protein, 11 aa, Artificial Sequence
  Description of Artificial Sequence: Synthetic peptide
QTGSEEIKSLY

SEQ ID NO: 21392 - protein, 9 aa, Artificial Sequence
  Description of Artificial Sequence: Synthetic peptide
KQILNIQKF

SEQ ID NO: 21393 - protein, 9 aa, Artificial Sequence
  Description of Artificial Sequence: Synthetic peptide
VVNRVRQGY

SEQ ID NO: 21394 - protein, 11 aa, Artificial Sequence
  Description of Artificial Sequence: Synthetic peptide
RQKQISSISER

SEQ ID NO: 21395 - protein, 10 aa, Artificial Sequence
  Description of Artificial Sequence: Synthetic peptide
VTNSAVMMQR

SEQ ID NO: 21396 - protein, 9 aa, Artificial Sequence
  Description of Artificial Sequence: Synthetic peptide
TVKVGGQLR

SEQ ID NO: 21397 - protein, 9 aa, Artificial Sequence
  Description of Artificial Sequence: Synthetic peptide
RQIREISQR

SEQ ID NO: 21398 - protein, 9 aa, Artificial Sequence
  Description of Artificial Sequence: Synthetic peptide
RARVLAVER

SEQ ID NO: 21399 - protein, 11 aa, Artificial Sequence
  Description of Artificial Sequence: Synthetic peptide
TVNDIQKLVGK

SEQ ID NO: 21400 - protein, 9 aa, Artificial Sequence
  Description of Artificial Sequence: Synthetic peptide
KQISSISER

SEQ ID NO: 21401 - protein, 11 aa, Artificial Sequence
  Description of Artificial Sequence: Synthetic peptide
KGRPGNFLQSR

SEQ ID NO: 21402 - protein, 11 aa, Artificial Sequence
  Description of Artificial Sequence: Synthetic peptide
QVTNSAVMMQR

SEQ ID NO: 21403 - protein, 8 aa, Artificial Sequence
  Description of Artificial Sequence: Synthetic peptide
QTLIPTSR

SEQ ID NO: 21404 - protein, 9 aa, Artificial Sequence
  Description of Artificial Sequence: Synthetic peptide
TVWGIKQLR

SEQ ID NO: 21405 - protein, 9 aa, Artificial Sequence
  Description of Artificial Sequence: Synthetic peptide
RARILAVER

SEQ ID NO: 21406 - protein, 9 aa, Artificial Sequence
  Description of Artificial Sequence: Synthetic peptide
VGWPAIRER

SEQ ID NO: 21407 - protein, 11 aa, Artificial Sequence
  Description of Artificial Sequence: Synthetic peptide
VGPTPVNIIGR

SEQ ID NO: 21408 - protein, 9 aa, Artificial Sequence
  Description of Artificial Sequence: Synthetic peptide
VVNRVRQGY

SEQ ID NO: 21409 - protein, 10 aa, Artificial Sequence
  Description of Artificial Sequence: Synthetic peptide
SVVNRVRQGY

SEQ ID NO: 21410 - protein, 11 aa, Artificial Sequence
  Description of Artificial Sequence: Synthetic peptide
ETFYVDGAAHR

SEQ ID NO: 21411 - protein, 11 aa, Artificial Sequence
  Description of Artificial Sequence: Synthetic peptide
ETFYVDGAANR

SEQ ID NO: 21412 - protein, 11 aa, Artificial Sequence
  Description of Artificial Sequence: Synthetic peptide
EAREFSSEQTR

SEQ ID NO: 21413 - protein, 11 aa, Artificial Sequence
  Description of Artificial Sequence: Synthetic peptide
DNNTRTEETFR

SEQ ID NO: 21414 - protein, 10 aa, Artificial Sequence
  Description of Artificial Sequence: Synthetic peptide
DNSEIKVVPR

SEQ ID NO: 21415 - protein, 9 aa, Artificial Sequence
  Description of Artificial Sequence: Synthetic peptide
EAVEINCTR

SEQ ID NO: 21416 - protein, 11 aa, Artificial Sequence
  Description of Artificial Sequence: Synthetic peptide
DVKQLTEAVQK

SEQ ID NO: 21417 - protein, 9 aa, Artificial Sequence
  Description of Artificial Sequence: Synthetic peptide
ETVQINCTR

SEQ ID NO: 21418 - protein, 9 aa, Artificial Sequence
  Description of Artificial Sequence: Synthetic peptide
TNSAVMMQR

SEQ ID NO: 21419 - protein, 10 aa, Artificial Sequence
  Description of Artificial Sequence: Synthetic peptide
VTNSAVMMQR

SEQ ID NO: 21420 - protein, 11 aa, Artificial Sequence
  Description of Artificial Sequence: Synthetic peptide
DVKQLTEVVQK

SEQ ID NO: 21421 - protein, 9 aa, Artificial Sequence
  Description of Artificial Sequence: Synthetic peptide
SNHTSTIYR

SEQ ID NO: 21422 - protein, 9 aa, Artificial Sequence
  Description of Artificial Sequence: Synthetic peptide
DAWEKIRLR

SEQ ID NO: 21423 - protein, 11 aa, Artificial Sequence
  Description of Artificial Sequence: Synthetic peptide
EARKFSSEQTR

SEQ ID NO: 21424 - protein, 9 aa, Artificial Sequence
  Description of Artificial Sequence: Synthetic peptide
DTTITIPCR

SEQ ID NO: 21425 - protein, 9 aa, Artificial Sequence
  Description of Artificial Sequence: Synthetic peptide
NITGMILTR

SEQ ID NO: 21426 - protein, 9 aa, Artificial Sequence
  Description of Artificial Sequence: Synthetic peptide
ETVQINCTR

SEQ ID NO: 21427 - protein, 11 aa, Artificial Sequence
  Description of Artificial Sequence: Synthetic peptide
ETFYVDGAANR

SEQ ID NO: 21428 - protein, 11 aa, Artificial Sequence
  Description of Artificial Sequence: Synthetic peptide
ETFYVDGAAHR

SEQ ID NO: 21429 - protein, 9 aa, Artificial Sequence
  Description of Artificial Sequence: Synthetic peptide
EAVEINCTR

SEQ ID NO: 21430 - protein, 11 aa, Artificial Sequence
  Description of Artificial Sequence: Synthetic peptide
EAREFSSEQTR

SEQ ID NO: 21431 - protein, 9 aa, Artificial Sequence
  Description of Artificial Sequence: Synthetic peptide
TNSAVMMQR

SEQ ID NO: 21432 - protein, 9 aa, Artificial Sequence
  Description of Artificial Sequence: Synthetic peptide
SNHTSTIYR

SEQ ID NO: 21433 - protein, 9 aa, Artificial Sequence
  Description of Artificial Sequence: Synthetic peptide
FYVDGAANR

SEQ ID NO: 21434 - protein, 9 aa, Artificial Sequence
  Description of Artificial Sequence: Synthetic peptide
MVHQALSPR

SEQ ID NO: 21435 - protein, 11 aa, Artificial Sequence
  Description of Artificial Sequence: Synthetic peptide
EISNHTSTIYR

SEQ ID NO: 21436 - protein, 11 aa, Artificial Sequence
  Description of Artificial Sequence: Synthetic peptide
TVNDIQKLVGK

SEQ ID NO: 21437 - protein, 9 aa, Artificial Sequence
  Description of Artificial Sequence: Synthetic peptide
TCTNVTNNR

SEQ ID NO: 21438 - protein, 9 aa, Artificial Sequence
  Description of Artificial Sequence: Synthetic peptide
TVKVGGQLR

SEQ ID NO: 21439 - protein, 10 aa, Artificial Sequence
  Description of Artificial Sequence: Synthetic peptide
VTNSAVMMQR

SEQ ID NO: 21440 - protein, 11 aa, Artificial Sequence
  Description of Artificial Sequence: Synthetic peptide
EARKFSSEQTR

SEQ ID NO: 21441 - protein, 10 aa, Artificial Sequence
  Description of Artificial Sequence: Synthetic peptide
DNSEIKVVPR

SEQ ID NO: 21442 - protein, 9 aa, Artificial Sequence
  Description of Artificial Sequence: Synthetic peptide
NSEIKVVPR

SEQ ID NO: 21443 - protein, 11 aa, Artificial Sequence
  Description of Artificial Sequence: Synthetic peptide
EPLGIAPTRAR

SEQ ID NO: 21444 - protein, 9 aa, Artificial Sequence
  Description of Artificial Sequence: Synthetic peptide
FYVDGAAHR

SEQ ID NO: 21445 - protein, 9 aa, Artificial Sequence
  Description of Artificial Sequence: Synthetic peptide
MYVSKKANR

SEQ ID NO: 21446 - protein, 8 aa, Artificial Sequence
  Description of Artificial Sequence: Synthetic peptide
QTLIPTSR

SEQ ID NO: 21447 - protein, 9 aa, Artificial Sequence
  Description of Artificial Sequence: Synthetic peptide
FTVLSVVNR

SEQ ID NO: 21448 - protein, 10 aa, Artificial Sequence
  Description of Artificial Sequence: Synthetic peptide
ELKKIIGQVR

SEQ ID NO: 21449 - protein, 11 aa, Artificial Sequence
  Description of Artificial Sequence: Synthetic peptide
ETFRPGGGDMR

SEQ ID NO: 21450 - protein, 10 aa, Artificial Sequence
  Description of Artificial Sequence: Synthetic peptide
IYQEPHKNLK

SEQ ID NO: 21451 - protein, 9 aa, Artificial Sequence
  Description of Artificial Sequence: Synthetic peptide
EYRKVVRQK

SEQ ID NO: 21452 - protein, 8 aa, Artificial Sequence
  Description of Artificial Sequence: Synthetic peptide
TVLSVVNR

SEQ ID NO: 21453 - protein, 9 aa, Artificial Sequence
  Description of Artificial Sequence: Synthetic peptide
FNLPPIVAK

SEQ ID NO: 21454 - protein, 11 aa, Artificial Sequence
  Description of Artificial Sequence: Synthetic peptide
VGSDLEIGQPR

SEQ ID NO: 21455 - protein, 9 aa, Artificial Sequence
  Description of Artificial Sequence: Synthetic peptide
NITGMILTR

SEQ ID NO: 21456 - protein, 9 aa, Artificial Sequence
  Description of Artificial Sequence: Synthetic peptide
EYRKLVKQK

SEQ ID NO: 21457 - protein, 10 aa, Artificial Sequence
  Description of Artificial Sequence: Synthetic peptide
SFQTLIPTSR

SEQ ID NO: 21458 - protein, 11 aa, Artificial Sequence
  Description of Artificial Sequence: Synthetic peptide
QVTNSAVMMQR

SEQ ID NO: 21459 - protein, 11 aa, Artificial Sequence
  Description of Artificial Sequence: Synthetic peptide
EVLASQQREAR

SEQ ID NO: 21460 - protein, 11 aa, Artificial Sequence
  Description of Artificial Sequence: Synthetic peptide
ETFYVDGAANR

SEQ ID NO: 21461 - protein, 11 aa, Artificial Sequence
  Description of Artificial Sequence: Synthetic peptide
ETFYVDGAAHR

SEQ ID NO: 21462 - protein, 9 aa, Artificial Sequence
  Description of Artificial Sequence: Synthetic peptide
ETVQINCTR

SEQ ID NO: 21463 - protein, 9 aa, Artificial Sequence
  Description of Artificial Sequence: Synthetic peptide
EAVEINCTR

SEQ ID NO: 21464 - protein, 9 aa, Artificial Sequence
  Description of Artificial Sequence: Synthetic peptide
TNSAVMMQR

SEQ ID NO: 21465 - protein, 10 aa, Artificial Sequence
  Description of Artificial Sequence: Synthetic peptide
TTGDIIGDIR

SEQ ID NO: 21466 - protein, 11 aa, Artificial Sequence
  Description of Artificial Sequence: Synthetic peptide
EISNHTSTIYR

SEQ ID NO: 21467 - protein, 11 aa, Artificial Sequence
  Description of Artificial Sequence: Synthetic peptide
QVTNSAVMMQR

SEQ ID NO: 21468 - protein, 11 aa, Artificial Sequence
  Description of Artificial Sequence: Synthetic peptide
TVNDIQKLVGK

SEQ ID NO: 21469 - protein, 11 aa, Artificial Sequence
  Description of Artificial Sequence: Synthetic peptide
ETFRPGGGDMR

SEQ ID NO: 21470 - protein, 9 aa, Artificial Sequence
  Description of Artificial Sequence: Synthetic peptide
NITGMILTR

SEQ ID NO: 21471 - protein, 9 aa, Artificial Sequence
  Description of Artificial Sequence: Synthetic peptide
TCTNVTNNR

SEQ ID NO: 21472 - protein, 10 aa, Artificial Sequence
  Description of Artificial Sequence: Synthetic peptide
DNSEIKVVPR

SEQ ID NO: 21473 - protein, 9 aa, Artificial Sequence
  Description of Artificial Sequence: Synthetic peptide
FTVLSVVNR

SEQ ID NO: 21474 - protein, 10 aa, Artificial Sequence
  Description of Artificial Sequence: Synthetic peptide
VTNSAVMMQR

SEQ ID NO: 21475 - protein, 9 aa, Artificial Sequence
  Description of Artificial Sequence: Synthetic peptide
NSEIKVVPR

SEQ ID NO: 21476 - protein, 10 aa, Artificial Sequence
  Description of Artificial Sequence: Synthetic peptide
EVNIVTDSQY

SEQ ID NO: 21477 - protein, 10 aa, Artificial Sequence
  Description of Artificial Sequence: Synthetic peptide
ASITLTVQAR

SEQ ID NO: 21478 - protein, 9 aa, Artificial Sequence
  Description of Artificial Sequence: Synthetic peptide
FAVLSVVNR

SEQ ID NO: 21479 - protein, 11 aa, Artificial Sequence
  Description of Artificial Sequence: Synthetic peptide
DVKQLTEAVQK

SEQ ID NO: 21480 - protein, 11 aa, Artificial Sequence
  Description of Artificial Sequence: Synthetic peptide
VGSDLEIGQPR

SEQ ID NO: 21481 - protein, 9 aa, Artificial Sequence
  Description of Artificial Sequence: Synthetic peptide
PTAGNITCR

SEQ ID NO: 21482 - protein, 10 aa, Artificial Sequence
  Description of Artificial Sequence: Synthetic peptide
ATGDIIGDIR

SEQ ID NO: 21483 - protein, 9 aa, Artificial Sequence
  Description of Artificial Sequence: Synthetic peptide
EPLGIAPTR

SEQ ID NO: 21484 - protein, 11 aa, Artificial Sequence
  Description of Artificial Sequence: Synthetic peptide
TAIAVAGGTDR

SEQ ID NO: 21485 - protein, 11 aa, Artificial Sequence
  Description of Artificial Sequence: Synthetic peptide
DVKQLTEVVQK

SEQ ID NO: 21486 - protein, 11 aa, Artificial Sequence
  Description of Artificial Sequence: Synthetic peptide
IVFTVLSVVNR

SEQ ID NO: 21487 - protein, 9 aa, Artificial Sequence
  Description of Artificial Sequence: Synthetic peptide
DTTITIPCR

SEQ ID NO: 21488 - protein, 10 aa, Artificial Sequence
  Description of Artificial Sequence: Synthetic peptide
DIIATDIQTK

SEQ ID NO: 21489 - protein, 11 aa, Artificial Sequence
  Description of Artificial Sequence: Synthetic peptide
TAIAVAEGTDR

SEQ ID NO: 21490 - protein, 11 aa, Artificial Sequence
  Description of Artificial Sequence: Synthetic peptide
VGPTPVNIIGR

SEQ ID NO: 21491 - protein, 9 aa, Artificial Sequence
  Description of Artificial Sequence: Synthetic peptide
SRIGIIPQR

SEQ ID NO: 21492 - protein, 11 aa, Artificial Sequence
  Description of Artificial Sequence: Synthetic peptide
IAFAVLSVVNR

SEQ ID NO: 21493 - protein, 9 aa, Artificial Sequence
  Description of Artificial Sequence: Synthetic peptide
ETAYFILKL

SEQ ID NO: 21494 - protein, 9 aa, Artificial Sequence
  Description of Artificial Sequence: Synthetic peptide
QLTEVVQKV

SEQ ID NO: 21495 - protein, 9 aa, Artificial Sequence
  Description of Artificial Sequence: Synthetic peptide
NTSTITQTC

SEQ ID NO: 21496 - protein, 9 aa, Artificial Sequence
  Description of Artificial Sequence: Synthetic peptide
TVLSVVNRV

SEQ ID NO: 21497 - protein, 9 aa, Artificial Sequence
  Description of Artificial Sequence: Synthetic peptide
NTIAVLYFV

SEQ ID NO: 21498 - protein, 9 aa, Artificial Sequence
  Description of Artificial Sequence: Synthetic peptide
NTKNIIVQL

SEQ ID NO: 21499 - protein, 9 aa, Artificial Sequence
  Description of Artificial Sequence: Synthetic peptide
EVIPMFTAL

SEQ ID NO: 21500 - protein, 9 aa, Artificial Sequence
  Description of Artificial Sequence: Synthetic peptide
TVNDIQKLV

SEQ ID NO: 21501 - protein, 9 aa, Artificial Sequence
  Description of Artificial Sequence: Synthetic peptide
HTSTIYRLI

SEQ ID NO: 21502 - protein, 9 aa, Artificial Sequence
  Description of Artificial Sequence: Synthetic peptide
ESFGFGEKI

SEQ ID NO: 21503 - protein, 11 aa, Artificial Sequence
  Description of Artificial Sequence: Synthetic peptide
ETFYVDGAAHR

SEQ ID NO: 21504 - protein, 9 aa, Artificial Sequence
  Description of Artificial Sequence: Synthetic peptide
FTSAVVKAA

SEQ ID NO: 21505 - protein, 9 aa, Artificial Sequence
  Description of Artificial Sequence: Synthetic peptide
TTITIPCRI

SEQ ID NO: 21506 - protein, 9 aa, Artificial Sequence
  Description of Artificial Sequence: Synthetic peptide
ETVQINCTR

SEQ ID NO: 21507 - protein, 9 aa, Artificial Sequence
  Description of Artificial Sequence: Synthetic peptide
EISNHTSTI

SEQ ID NO: 21508 - protein, 9 aa, Artificial Sequence
  Description of Artificial Sequence: Synthetic peptide
LTVGIIALV

SEQ ID NO: 21509 - protein, 9 aa, Artificial Sequence
  Description of Artificial Sequence: Synthetic peptide
WTIEILEEL

SEQ ID NO: 21510 - protein, 9 aa, Artificial Sequence
  Description of Artificial Sequence: Synthetic peptide
YTAFTIPSI

SEQ ID NO: 21511 - protein, 9 aa, Artificial Sequence
  Description of Artificial Sequence: Synthetic peptide
ETTNQKAEL

SEQ ID NO: 21512 - protein, 9 aa, Artificial Sequence
  Description of Artificial Sequence: Synthetic peptide
FTSTVVKAA

SEQ ID NO: 21513 - protein, 9 aa, Artificial Sequence
  Description of Artificial Sequence: Synthetic peptide
GAASITLTV

SEQ ID NO: 21514 - protein, 9 aa, Artificial Sequence
  Description of Artificial Sequence: Synthetic peptide
TTSTLQEQI

SEQ ID NO: 21515 - protein, 9 aa, Artificial Sequence
  Description of Artificial Sequence: Synthetic peptide
NTSTVTQAC

SEQ ID NO: 21516 - protein, 9 aa, Artificial Sequence
  Description of Artificial Sequence: Synthetic peptide
MTSNPPVPV

SEQ ID NO: 21517 - protein, 9 aa, Artificial Sequence
  Description of Artificial Sequence: Synthetic peptide
EVIPMFSAL

SEQ ID NO: 21518 - protein, 11 aa, Artificial Sequence
  Description of Artificial Sequence: Synthetic peptide
ETFYVDGAANR

SEQ ID NO: 21519 - protein, 9 aa, Artificial Sequence
  Description of Artificial Sequence: Synthetic peptide
DVKQLTEAV

SEQ ID NO: 21520 - protein, 9 aa, Artificial Sequence
  Description of Artificial Sequence: Synthetic peptide
LVNQIIEQL

SEQ ID NO: 21521 - protein, 9 aa, Artificial Sequence
  Description of Artificial Sequence: Synthetic peptide
ESFGFGEEI

SEQ ID NO: 21522 - protein, 9 aa, Artificial Sequence
  Description of Artificial Sequence: Synthetic peptide
MTSNPPIPV

SEQ ID NO: 21523 - protein, 9 aa, Artificial Sequence
  Description of Artificial Sequence: Synthetic peptide
QNYPIVQNL

SEQ ID NO: 21524 - protein, 9 aa, Artificial Sequence
  Description of Artificial Sequence: Synthetic peptide
RPKPPVPSV

SEQ ID NO: 21525 - protein, 9 aa, Artificial Sequence
  Description of Artificial Sequence: Synthetic peptide
SPAIFQHSM

SEQ ID NO: 21526 - protein, 10 aa, Artificial Sequence
  Description of Artificial Sequence: Synthetic peptide
SPAEIKNCSF

SEQ ID NO: 21527 - protein, 9 aa, Artificial Sequence
  Description of Artificial Sequence: Synthetic peptide
SPTSRELRV

SEQ ID NO: 21528 - protein, 9 aa, Artificial Sequence
  Description of Artificial Sequence: Synthetic peptide
QVRDTKEAL

SEQ ID NO: 21529 - protein, 9 aa, Artificial Sequence
  Description of Artificial Sequence: Synthetic peptide
QPRTKIEEL

SEQ ID NO: 21530 - protein, 10 aa, Artificial Sequence
  Description of Artificial Sequence: Synthetic peptide
RPNNNTRKSI

SEQ ID NO: 21531 - protein, 8 aa, Artificial Sequence
  Description of Artificial Sequence: Synthetic peptide
KPVVSTQL

SEQ ID NO: 21532 - protein, 10 aa, Artificial Sequence
  Description of Artificial Sequence: Synthetic peptide
SPIETVPVKL

SEQ ID NO: 21533 - protein, 10 aa, Artificial Sequence
  Description of Artificial Sequence: Synthetic peptide
RPSNNTRKSI

SEQ ID NO: 21534 - protein, 9 aa, Artificial Sequence
  Description of Artificial Sequence: Synthetic peptide
IPVEPDTVL

SEQ ID NO: 21535 - protein, 8 aa, Artificial Sequence
  Description of Artificial Sequence: Synthetic peptide
TPSLRQEM

SEQ ID NO: 21536 - protein, 10 aa, Artificial Sequence
  Description of Artificial Sequence: Synthetic peptide
KEQSPPLTSL

SEQ ID NO: 21537 - protein, 9 aa, Artificial Sequence
  Description of Artificial Sequence: Synthetic peptide
SPAIFQCSM

SEQ ID NO: 21538 - protein, 10 aa, Artificial Sequence
  Description of Artificial Sequence: Synthetic peptide
SPPLTSLKSL

SEQ ID NO: 21539 - protein, 10 aa, Artificial Sequence
  Description of Artificial Sequence: Synthetic peptide
QEQGPPLTSL

SEQ ID NO: 21540 - protein, 9 aa, Artificial Sequence
  Description of Artificial Sequence: Synthetic peptide
TPQDLNTML

SEQ ID NO: 21541 - protein, 8 aa, Artificial Sequence
  Description of Artificial Sequence: Synthetic peptide
EVVQKVAM

SEQ ID NO: 21542 - protein, 8 aa, Artificial Sequence
  Description of Artificial Sequence: Synthetic peptide
DPLRKQPL

SEQ ID NO: 21543 - protein, 9 aa, Artificial Sequence
  Description of Artificial Sequence: Synthetic peptide
ELKNSAISL

SEQ ID NO: 21544 - protein, 9 aa, Artificial Sequence
  Description of Artificial Sequence: Synthetic peptide
YPGIKVKQL

SEQ ID NO: 21545 - protein, 8 aa, Artificial Sequence
  Description of Artificial Sequence: Synthetic peptide
DPIPKQPL

SEQ ID NO: 21546 - protein, 9 aa, Artificial Sequence
  Description of Artificial Sequence: Synthetic peptide
DVKQLTEAV

SEQ ID NO: 21547 - protein, 9 aa, Artificial Sequence
  Description of Artificial Sequence: Synthetic peptide
SISERLLSA

SEQ ID NO: 21548 - protein, 8 aa, Artificial Sequence
  Description of Artificial Sequence: Synthetic peptide
TTNQKTEL

SEQ ID NO: 21549 - protein, 8 aa, Artificial Sequence
  Description of Artificial Sequence: Synthetic peptide
HLKTAVQM

SEQ ID NO: 21550 - protein, 11 aa, Artificial Sequence
  Description of Artificial Sequence: Synthetic peptide
TQVDPGLADQL

SEQ ID NO: 21551 - protein, 11 aa, Artificial Sequence
  Description of Artificial Sequence: Synthetic peptide
TQVEPDLADQL

SEQ ID NO: 21552 - protein, 10 aa, Artificial Sequence
  Description of Artificial Sequence: Synthetic peptide
GQVRDQAEHL

SEQ ID NO: 21553 - protein, 9 aa, Artificial Sequence
  Description of Artificial Sequence: Synthetic peptide
IQKQGNDQW

SEQ ID NO: 21554 - protein, 9 aa, Artificial Sequence
  Description of Artificial Sequence: Synthetic peptide
AQEEEEVGF

SEQ ID NO: 21555 - protein, 9 aa, Artificial Sequence
  Description of Artificial Sequence: Synthetic peptide
IQLPDKDSW

SEQ ID NO: 21556 - protein, 10 aa, Artificial Sequence
  Description of Artificial Sequence: Synthetic peptide
IQVRDTKEAL

SEQ ID NO: 21557 - protein, 10 aa, Artificial Sequence
  Description of Artificial Sequence: Synthetic peptide
KQLTEAVQKI

SEQ ID NO: 21558 - protein, 9 aa, Artificial Sequence
  Description of Artificial Sequence: Synthetic peptide
QLTEVVQKV

SEQ ID NO: 21559 - protein, 9 aa, Artificial Sequence
  Description of Artificial Sequence: Synthetic peptide
GAASITLTV

SEQ ID NO: 21560 - protein, 9 aa, Artificial Sequence
  Description of Artificial Sequence: Synthetic peptide
QLTEAVQKI

SEQ ID NO: 21561 - protein, 9 aa, Artificial Sequence
  Description of Artificial Sequence: Synthetic peptide
SQIYPGIKV

SEQ ID NO: 21562 - protein, 9 aa, Artificial Sequence
  Description of Artificial Sequence: Synthetic peptide
QQHLLQLTV

SEQ ID NO: 21563 - protein, 8 aa, Artificial Sequence
  Description of Artificial Sequence: Synthetic peptide
SQVTNPVV

SEQ ID NO: 21564 - protein, 9 aa, Artificial Sequence
  Description of Artificial Sequence: Synthetic peptide
QQQMLQLTV

SEQ ID NO: 21565 - protein, 9 aa, Artificial Sequence
  Description of Artificial Sequence: Synthetic peptide
GQVDCSPGI

SEQ ID NO: 21566 - protein, 9 aa, Artificial Sequence
  Description of Artificial Sequence: Synthetic peptide
IITQIQPSI

SEQ ID NO: 21567 - protein, 9 aa, Artificial Sequence
  Description of Artificial Sequence: Synthetic peptide
SQIFPGIKV

SEQ ID NO: 21568 - protein, 9 aa, Artificial Sequence
  Description of Artificial Sequence: Synthetic peptide
AVLSVVNRV

SEQ ID NO: 21569 - protein, 8 aa, Artificial Sequence
  Description of Artificial Sequence: Synthetic peptide
VQIEPLGI

SEQ ID NO: 21570 - protein, 10 aa, Artificial Sequence
  Description of Artificial Sequence: Synthetic peptide
GQWNKTVNQV

SEQ ID NO: 21571 - protein, 9 aa, Artificial Sequence
  Description of Artificial Sequence: Synthetic peptide
AISIVALVV

SEQ ID NO: 21572 - protein, 9 aa, Artificial Sequence
  Description of Artificial Sequence: Synthetic peptide
VQLNETVQI

SEQ ID NO: 21573 - protein, 8 aa, Artificial Sequence
  Description of Artificial Sequence: Synthetic peptide
VQIKQSEI

SEQ ID NO: 21574 - protein, 9 aa, Artificial Sequence
  Description of Artificial Sequence: Synthetic peptide
QQLLTPVRI

SEQ ID NO: 21575 - protein, 9 aa, Artificial Sequence
  Description of Artificial Sequence: Synthetic peptide
VQKVAMESI

SEQ ID NO: 21576 - protein, 9 aa, Artificial Sequence
  Description of Artificial Sequence: Synthetic peptide
TVLSVVNRV

SEQ ID NO: 21577 - protein, 8 aa, Artificial Sequence
  Description of Artificial Sequence: Synthetic peptide
GQMVHQAL

SEQ ID NO: 21578 - protein, 9 aa, Artificial Sequence
  Description of Artificial Sequence: Synthetic peptide
VLAEAMSQV

SEQ ID NO: 21579 - protein, 9 aa, Artificial Sequence
  Description of Artificial Sequence: Synthetic peptide
ILAEAMSQV

SEQ ID NO: 21580 - protein, 9 aa, Artificial Sequence
  Description of Artificial Sequence: Synthetic peptide
ALGETGHLI

SEQ ID NO: 21581 - protein, 9 aa, Artificial Sequence
  Description of Artificial Sequence: Synthetic peptide
VQKIATEGI

SEQ ID NO: 21582 - protein, 10 aa, Artificial Sequence
  Description of Artificial Sequence: Synthetic peptide
KQLTEAVQKI

SEQ ID NO: 21583 - protein, 9 aa, Artificial Sequence
  Description of Artificial Sequence: Synthetic peptide
TQVGSLQYL

SEQ ID NO: 21584 - protein, 9 aa, Artificial Sequence
  Description of Artificial Sequence: Synthetic peptide
GQKAIGTVL

SEQ ID NO: 21585 - protein, 9 aa, Artificial Sequence
  Description of Artificial Sequence: Synthetic peptide
VQLNEAVEI

SEQ ID NO: 21586 - protein, 8 aa, Artificial Sequence
  Description of Artificial Sequence: Synthetic peptide
RQKQISSI

SEQ ID NO: 21587 - protein, 8 aa, Artificial Sequence
  Description of Artificial Sequence: Synthetic peptide
NQIIEQLI

SEQ ID NO: 21588 - protein, 9 aa, Artificial Sequence
  Description of Artificial Sequence: Synthetic peptide
YQLETEPIV

SEQ ID NO: 21589 - protein, 8 aa, Artificial Sequence
  Description of Artificial Sequence: Synthetic peptide
GQETAYFI

SEQ ID NO: 21590 - protein, 9 aa, Artificial Sequence
  Description of Artificial Sequence: Synthetic peptide
NQKTELQAI

SEQ ID NO: 21591 - protein, 9 aa, Artificial Sequence
  Description of Artificial Sequence: Synthetic peptide
GLGSPQISV

SEQ ID NO: 21592 - protein, 10 aa, Artificial Sequence
  Description of Artificial Sequence: Synthetic peptide
AQQQMLQLTV

SEQ ID NO: 21593 - protein, 9 aa, Artificial Sequence
  Description of Artificial Sequence: Synthetic peptide
NQKAELQAI

SEQ ID NO: 21594 - protein, 9 aa, Artificial Sequence
  Description of Artificial Sequence: Synthetic peptide
ERYLRDQQL

SEQ ID NO: 21595 - protein, 8 aa, Artificial Sequence
  Description of Artificial Sequence: Synthetic peptide
QRVLSSCL

SEQ ID NO: 21596 - protein, 9 aa, Artificial Sequence
  Description of Artificial Sequence: Synthetic peptide
ERYLKDQQL

SEQ ID NO: 21597 - protein, 9 aa, Artificial Sequence
  Description of Artificial Sequence: Synthetic peptide
DRVGTQPAA

SEQ ID NO: 21598 - protein, 9 aa, Artificial Sequence
  Description of Artificial Sequence: Synthetic peptide
ERFALNPGL

SEQ ID NO: 21599 - protein, 9 aa, Artificial Sequence
  Description of Artificial Sequence: Synthetic peptide
ERFALNPNL

SEQ ID NO: 21600 - protein, 9 aa, Artificial Sequence
  Description of Artificial Sequence: Synthetic peptide
ERYLRDQQL

SEQ ID NO: 21601 - protein, 8 aa, Artificial Sequence
  Description of Artificial Sequence: Synthetic peptide
GQMVHQAL

SEQ ID NO: 21602 - protein, 9 aa, Artificial Sequence
  Description of Artificial Sequence: Synthetic peptide
ERYLKDQQL

SEQ ID NO: 21603 - protein, 8 aa, Artificial Sequence
  Description of Artificial Sequence: Synthetic peptide
LQAIHLAL

SEQ ID NO: 21604 - protein, 8 aa, Artificial Sequence
  Description of Artificial Sequence: Synthetic peptide
QRVLSSCL

SEQ ID NO: 21605 - protein, 8 aa, Artificial Sequence
  Description of Artificial Sequence: Synthetic peptide
IQKLVGKL

SEQ ID NO: 21606 - protein, 9 aa, Artificial Sequence
  Description of Artificial Sequence: Synthetic peptide
TEVVQKVAM

SEQ ID NO: 21607 - protein, 9 aa, Artificial Sequence
  Description of Artificial Sequence: Synthetic peptide
GQKAIGTVL

SEQ ID NO: 21608 - protein, 8 aa, Artificial Sequence
  Description of Artificial Sequence: Synthetic peptide
GQHIYTTY

SEQ ID NO: 21609 - protein, 9 aa, Artificial Sequence
  Description of Artificial Sequence: Synthetic peptide
AVTSSNTAF

SEQ ID NO: 21610 - protein, 9 aa, Artificial Sequence
  Description of Artificial Sequence: Synthetic peptide
SQVTNSAVM

SEQ ID NO: 21611 - protein, 8 aa, Artificial Sequence
  Description of Artificial Sequence: Synthetic peptide
GQMVHQAL

SEQ ID NO: 21612 - protein, 9 aa, Artificial Sequence
  Description of Artificial Sequence: Synthetic peptide
SQVTNPVVM

SEQ ID NO: 21613 - protein, 9 aa, Artificial Sequence
  Description of Artificial Sequence: Synthetic peptide
KQILNIQKF

SEQ ID NO: 21614 - protein, 9 aa, Artificial Sequence
  Description of Artificial Sequence: Synthetic peptide
LQKGLGICY

SEQ ID NO: 21615 - protein, 9 aa, Artificial Sequence
  Description of Artificial Sequence: Synthetic peptide
TQACPKVSF

SEQ ID NO: 21616 - protein, 9 aa, Artificial Sequence
  Description of Artificial Sequence: Synthetic peptide
KQITKIQNF

SEQ ID NO: 21617 - protein, 9 aa, Artificial Sequence
  Description of Artificial Sequence: Synthetic peptide
TQIGCTLNF

SEQ ID NO: 21618 - protein, 9 aa, Artificial Sequence
  Description of Artificial Sequence: Synthetic peptide
ISNHTSTIY

SEQ ID NO: 21619 - protein, 9 aa, Artificial Sequence
  Description of Artificial Sequence: Synthetic peptide
TVLDVGDAY

SEQ ID NO: 21620 - protein, 11 aa, Artificial Sequence
  Description of Artificial Sequence: Synthetic peptide
IQKQGNDQWTY

SEQ ID NO: 21621 - protein, 10 aa, Artificial Sequence
  Description of Artificial Sequence: Synthetic peptide
ILKEPVHGVY

SEQ ID NO: 21622 - protein, 8 aa, Artificial Sequence
  Description of Artificial Sequence: Synthetic peptide
TQVGSLQY

SEQ ID NO: 21623 - protein, 9 aa, Artificial Sequence
  Description of Artificial Sequence: Synthetic peptide
ALVEICTEM

SEQ ID NO: 21624 - protein, 8 aa, Artificial Sequence
  Description of Artificial Sequence: Synthetic peptide
AVHVASGY

SEQ ID NO: 21625 - protein, 8 aa, Artificial Sequence
  Description of Artificial Sequence: Synthetic peptide
AELVVTTY

SEQ ID NO: 21626 - protein, 9 aa, Artificial Sequence
  Description of Artificial Sequence: Synthetic peptide
RAIEAQQQM

SEQ ID NO: 21627 - protein, 9 aa, Artificial Sequence
  Description of Artificial Sequence: Synthetic peptide
FLGAAGSTM

SEQ ID NO: 21628 - protein, 9 aa, Artificial Sequence
  Description of Artificial Sequence: Synthetic peptide
EQSPPLTSL

SEQ ID NO: 21629 - protein, 9 aa, Artificial Sequence
  Description of Artificial Sequence: Synthetic peptide
VQKIATEGI

SEQ ID NO: 21630 - protein, 9 aa, Artificial Sequence
  Description of Artificial Sequence: Synthetic peptide
WQKVGQAIY

SEQ ID NO: 21631 - protein, 9 aa, Artificial Sequence
  Description of Artificial Sequence: Synthetic peptide
VQKVAMESI

SEQ ID NO: 21632 - protein, 9 aa, Artificial Sequence
  Description of Artificial Sequence: Synthetic peptide
HTQVGSLQY

SEQ ID NO: 21633 - protein, 8 aa, Artificial Sequence
  Description of Artificial Sequence: Synthetic peptide
VQYWSQEL

SEQ ID NO: 21634 - protein, 9 aa, Artificial Sequence
  Description of Artificial Sequence: Synthetic peptide
SQRVLSSCL

SEQ ID NO: 21635 - protein, 8 aa, Artificial Sequence
  Description of Artificial Sequence: Synthetic peptide
GQHIYNNY

SEQ ID NO: 21636 - protein, 9 aa, Artificial Sequence
  Description of Artificial Sequence: Synthetic peptide
TVLDVGDAY

SEQ ID NO: 21637 - protein, 9 aa, Artificial Sequence
  Description of Artificial Sequence: Synthetic peptide
FLGAAGSTM

SEQ ID NO: 21638 - protein, 9 aa, Artificial Sequence
  Description of Artificial Sequence: Synthetic peptide
SQVTNSAVM

SEQ ID NO: 21639 - protein, 8 aa, Artificial Sequence
  Description of Artificial Sequence: Synthetic peptide
DQLIHIYY

SEQ ID NO: 21640 - protein, 9 aa, Artificial Sequence
  Description of Artificial Sequence: Synthetic peptide
TQACPKVSF

SEQ ID NO: 21641 - protein, 9 aa, Artificial Sequence
  Description of Artificial Sequence: Synthetic peptide
SQVTNPVVM

SEQ ID NO: 21642 - protein, 9 aa, Artificial Sequence
  Description of Artificial Sequence: Synthetic peptide
TVGGHQAAM

SEQ ID NO: 21643 - protein, 9 aa, Artificial Sequence
  Description of Artificial Sequence: Synthetic peptide
EQSPPLTSL

SEQ ID NO: 21644 - protein, 9 aa, Artificial Sequence
  Description of Artificial Sequence: Synthetic peptide
EQGPPLTSL

SEQ ID NO: 21645 - protein, 10 aa, Artificial Sequence
  Description of Artificial Sequence: Synthetic peptide
EISNHTSTIY

SEQ ID NO: 21646 - protein, 9 aa, Artificial Sequence
  Description of Artificial Sequence: Synthetic peptide
DAELVVTTY

SEQ ID NO: 21647 - protein, 9 aa, Artificial Sequence
  Description of Artificial Sequence: Synthetic peptide
SPAIFQHSM

SEQ ID NO: 21648 - protein, 9 aa, Artificial Sequence
  Description of Artificial Sequence: Synthetic peptide
HMGPGKAFY

SEQ ID NO: 21649 - protein, 8 aa, Artificial Sequence
  Description of Artificial Sequence: Synthetic peptide
TQVGSLQY

SEQ ID NO: 21650 - protein, 10 aa, Artificial Sequence
  Description of Artificial Sequence: Synthetic peptide
NLGQHIYTTY

SEQ ID NO: 21651 - protein, 9 aa, Artificial Sequence
  Description of Artificial Sequence: Synthetic peptide
FPQGEAREF

SEQ ID NO: 21652 - protein, 9 aa, Artificial Sequence
  Description of Artificial Sequence: Synthetic peptide
SAEPVPLQL

SEQ ID NO: 21653 - protein, 9 aa, Artificial Sequence
  Description of Artificial Sequence: Synthetic peptide
DIAGTTSTL

SEQ ID NO: 21654 - protein, 9 aa, Artificial Sequence
  Description of Artificial Sequence: Synthetic peptide
AVTSSNTAF

SEQ ID NO: 21655 - protein, 8 aa, Artificial Sequence
  Description of Artificial Sequence: Synthetic peptide
GQHIYTTY

SEQ ID NO: 21656 - protein, 10 aa, Artificial Sequence
  Description of Artificial Sequence: Synthetic peptide
EVNIVTDSQY

SEQ ID NO: 21657 - protein, 8 aa, Artificial Sequence
  Description of Artificial Sequence: Synthetic peptide
GQHIYTTY

SEQ ID NO: 21658 - protein, 9 aa, Artificial Sequence
  Description of Artificial Sequence: Synthetic peptide
GQKAIGTVL

SEQ ID NO: 21659 - protein, 9 aa, Artificial Sequence
  Description of Artificial Sequence: Synthetic peptide
SKIGPENPY

SEQ ID NO: 21660 - protein, 8 aa, Artificial Sequence
  Description of Artificial Sequence: Synthetic peptide
GQMVHQAL

SEQ ID NO: 21661 - protein, 9 aa, Artificial Sequence
  Description of Artificial Sequence: Synthetic peptide
LQKGLGICY

SEQ ID NO: 21662 - protein, 9 aa, Artificial Sequence
  Description of Artificial Sequence: Synthetic peptide
SQVTNPVVM

SEQ ID NO: 21663 - protein, 9 aa, Artificial Sequence
  Description of Artificial Sequence: Synthetic peptide
VKVIEEKAF

SEQ ID NO: 21664 - protein, 9 aa, Artificial Sequence
  Description of Artificial Sequence: Synthetic peptide
SQVTNSAVM

SEQ ID NO: 21665 - protein, 9 aa, Artificial Sequence
  Description of Artificial Sequence: Synthetic peptide
KQILNIQKF

SEQ ID NO: 21666 - protein, 9 aa, Artificial Sequence
  Description of Artificial Sequence: Synthetic peptide
IKNPEMVIY

SEQ ID NO: 21667 - protein, 9 aa, Artificial Sequence
  Description of Artificial Sequence: Synthetic peptide
KQITKIQNF

SEQ ID NO: 21668 - protein, 9 aa, Artificial Sequence
  Description of Artificial Sequence: Synthetic peptide
TQACPKVSF

SEQ ID NO: 21669 - protein, 8 aa, Artificial Sequence
  Description of Artificial Sequence: Synthetic peptide
TQVGSLQY

SEQ ID NO: 21670 - protein, 9 aa, Artificial Sequence
  Description of Artificial Sequence: Synthetic peptide
IHMGPGKAF

SEQ ID NO: 21671 - protein, 9 aa, Artificial Sequence
  Description of Artificial Sequence: Synthetic peptide
EHLKTAVQM

SEQ ID NO: 21672 - protein, 9 aa, Artificial Sequence
  Description of Artificial Sequence: Synthetic peptide
IHIGPGRAF

SEQ ID NO: 21673 - protein, 9 aa, Artificial Sequence
  Description of Artificial Sequence: Synthetic peptide
SQVTNSAVM

SEQ ID NO: 21674 - protein, 9 aa, Artificial Sequence
  Description of Artificial Sequence: Synthetic peptide
EQSPPLTSL

SEQ ID NO: 21675 - protein, 9 aa, Artificial Sequence
  Description of Artificial Sequence: Synthetic peptide
THLEGKIIL

SEQ ID NO: 21676 - protein, 8 aa, Artificial Sequence
  Description of Artificial Sequence: Synthetic peptide
MHTDIISL

SEQ ID NO: 21677 - protein, 9 aa, Artificial Sequence
  Description of Artificial Sequence: Synthetic peptide
HQALSPRTL

SEQ ID NO: 21678 - protein, 9 aa, Artificial Sequence
  Description of Artificial Sequence: Synthetic peptide
SQVTNPVVM

SEQ ID NO: 21679 - protein, 9 aa, Artificial Sequence
  Description of Artificial Sequence: Synthetic peptide
EQGPPLTSL

SEQ ID NO: 21680 - protein, 9 aa, Artificial Sequence
  Description of Artificial Sequence: Synthetic peptide
GHQAAMQML

SEQ ID NO: 21681 - protein, 10 aa, Artificial Sequence
  Description of Artificial Sequence: Synthetic peptide
EHFKNGTITF

SEQ ID NO: 21682 - protein, 9 aa, Artificial Sequence
  Description of Artificial Sequence: Synthetic peptide
IREISQRVL

SEQ ID NO: 21683 - protein, 9 aa, Artificial Sequence
  Description of Artificial Sequence: Synthetic peptide
AHTNDVKQL

SEQ ID NO: 21684 - protein, 9 aa, Artificial Sequence
  Description of Artificial Sequence: Synthetic peptide
GQKAIGTVL

SEQ ID NO: 21685 - protein, 9 aa, Artificial Sequence
  Description of Artificial Sequence: Synthetic peptide
IHTDNGTNF

SEQ ID NO: 21686 - protein, 9 aa, Artificial Sequence
  Description of Artificial Sequence: Synthetic peptide
NHTSTIYRL

SEQ ID NO: 21687 - protein, 9 aa, Artificial Sequence
  Description of Artificial Sequence: Synthetic peptide
SQIYPGIKV

SEQ ID NO: 21688 - protein, 8 aa, Artificial Sequence
  Description of Artificial Sequence: Synthetic peptide
EHFKNGTI

SEQ ID NO: 21689 - protein, 9 aa, Artificial Sequence
  Description of Artificial Sequence: Synthetic peptide
YRTQVEPDL

SEQ ID NO: 21690 - protein, 9 aa, Artificial Sequence
  Description of Artificial Sequence: Synthetic peptide
TVLDVGDAY

SEQ ID NO: 21691 - protein, 9 aa, Artificial Sequence
  Description of Artificial Sequence: Synthetic peptide
TINDEAAEW

SEQ ID NO: 21692 - protein, 9 aa, Artificial Sequence
  Description of Artificial Sequence: Synthetic peptide
TINEEAAEW

SEQ ID NO: 21693 - protein, 8 aa, Artificial Sequence
  Description of Artificial Sequence: Synthetic peptide
AELVVTTY

SEQ ID NO: 21694 - protein, 9 aa, Artificial Sequence
  Description of Artificial Sequence: Synthetic peptide
TEVVQKVAM

SEQ ID NO: 21695 - protein, 8 aa, Artificial Sequence
  Description of Artificial Sequence: Synthetic peptide
DEIKNCSF

SEQ ID NO: 21696 - protein, 8 aa, Artificial Sequence
  Description of Artificial Sequence: Synthetic peptide
NETPGVRY

SEQ ID NO: 21697 - protein, 11 aa, Artificial Sequence
  Description of Artificial Sequence: Synthetic peptide
SEVNIVTDSQY

SEQ ID NO: 21698 - protein, 8 aa, Artificial Sequence
  Description of Artificial Sequence: Synthetic peptide
NETPGIRY

SEQ ID NO: 21699 - protein, 8 aa, Artificial Sequence
  Description of Artificial Sequence: Synthetic peptide
DEQLLTTV

SEQ ID NO: 21700 - protein, 8 aa, Artificial Sequence
  Description of Artificial Sequence: Synthetic peptide
MENVTENF

SEQ ID NO: 21701 - protein, 8 aa, Artificial Sequence
  Description of Artificial Sequence: Synthetic peptide
SEEIKSLY

SEQ ID NO: 21702 - protein, 8 aa, Artificial Sequence
  Description of Artificial Sequence: Synthetic peptide
LENVTENF

SEQ ID NO: 21703 - protein, 8 aa, Artificial Sequence
  Description of Artificial Sequence: Synthetic peptide
PEMVIYQY

SEQ ID NO: 21704 - protein, 9 aa, Artificial Sequence
  Description of Artificial Sequence: Synthetic peptide
YETEVHNVW

SEQ ID NO: 21705 - protein, 8 aa, Artificial Sequence
  Description of Artificial Sequence: Synthetic peptide
TELQAIHL

SEQ ID NO: 21706 - protein, 9 aa, Artificial Sequence
  Description of Artificial Sequence: Synthetic peptide
ARVLAVERY

SEQ ID NO: 21707 - protein, 10 aa, Artificial Sequence
  Description of Artificial Sequence: Synthetic peptide
VRQGYSPLSF

SEQ ID NO: 21708 - protein, 9 aa, Artificial Sequence
  Description of Artificial Sequence: Synthetic peptide
ARILAVERY

SEQ ID NO: 21709 - protein, 10 aa, Artificial Sequence
  Description of Artificial Sequence: Synthetic peptide
GGLDGLIYSK

SEQ ID NO: 21710 - protein, 11 aa, Artificial Sequence
  Description of Artificial Sequence: Synthetic peptide
LIEESQIQQEK

SEQ ID NO: 21711 - protein, 9 aa, Artificial Sequence
  Description of Artificial Sequence: Synthetic peptide
QRQGTEPSF

SEQ ID NO: 21712 - protein, 9 aa, Artificial Sequence
  Description of Artificial Sequence: Synthetic peptide
YETEVHNVW

SEQ ID NO: 21713 - protein, 10 aa, Artificial Sequence
  Description of Artificial Sequence: Synthetic peptide
GHTQVGSLQY

SEQ ID NO: 21714 - protein, 9 aa, Artificial Sequence
  Description of Artificial Sequence: Synthetic peptide
GLDGLIYSK

SEQ ID NO: 21715 - protein, 11 aa, Artificial Sequence
  Description of Artificial Sequence: Synthetic peptide
TAIAVAEGTDR

SEQ ID NO: 21716 - protein, 9 aa, Artificial Sequence
  Description of Artificial Sequence: Synthetic peptide
GRAGYVTDR

SEQ ID NO: 21717 - protein, 9 aa, Artificial Sequence
  Description of Artificial Sequence: Synthetic peptide
SRIGIIPQR

SEQ ID NO: 21718 - protein, 9 aa, Artificial Sequence
  Description of Artificial Sequence: Synthetic peptide
GRAGYVTDR

SEQ ID NO: 21719 - protein, 9 aa, Artificial Sequence
  Description of Artificial Sequence: Synthetic peptide
SRIGILRQR

SEQ ID NO: 21720 - protein, 9 aa, Artificial Sequence
  Description of Artificial Sequence: Synthetic peptide
ARVLAVERY

SEQ ID NO: 21721 - protein, 10 aa, Artificial Sequence
  Description of Artificial Sequence: Synthetic peptide
KRFNGTGPCK

SEQ ID NO: 21722 - protein, 9 aa, Artificial Sequence
  Description of Artificial Sequence: Synthetic peptide
ARILAVERY

SEQ ID NO: 21723 - protein, 9 aa, Artificial Sequence
  Description of Artificial Sequence: Synthetic peptide
YRTQVDPGL

SEQ ID NO: 21724 - protein, 11 aa, Artificial Sequence
  Description of Artificial Sequence: Synthetic peptide
IPAETGQETAY

SEQ ID NO: 21725 - protein, 9 aa, Artificial Sequence
  Description of Artificial Sequence: Synthetic peptide
EPIVGAETF

SEQ ID NO: 21726 - protein, 9 aa, Artificial Sequence
  Description of Artificial Sequence: Synthetic peptide
FPQGEAREF

SEQ ID NO: 21727 - protein, 9 aa, Artificial Sequence
  Description of Artificial Sequence: Synthetic peptide
NPEMVIYQY

SEQ ID NO: 21728 - protein, 9 aa, Artificial Sequence
  Description of Artificial Sequence: Synthetic peptide
IPVEPDTVL

SEQ ID NO: 21729 - protein, 9 aa, Artificial Sequence
  Description of Artificial Sequence: Synthetic peptide
DAELVVTTY

SEQ ID NO: 21730 - protein, 9 aa, Artificial Sequence
  Description of Artificial Sequence: Synthetic peptide
TVLDVGDAY

SEQ ID NO: 21731 - protein, 8 aa, Artificial Sequence
  Description of Artificial Sequence: Synthetic peptide
TPGPGIRY

SEQ ID NO: 21732 - protein, 9 aa, Artificial Sequence
  Description of Artificial Sequence: Synthetic peptide
SPAIFQHSM

SEQ ID NO: 21733 - protein, 9 aa, Artificial Sequence
  Description of Artificial Sequence: Synthetic peptide
DPNPQEVEM

SEQ ID NO: 21734 - protein, 9 aa, Artificial Sequence
  Description of Artificial Sequence: Synthetic peptide
PPVPVGEIY

SEQ ID NO: 21735 - protein, 9 aa, Artificial Sequence
  Description of Artificial Sequence: Synthetic peptide
NPDMVLYQY

SEQ ID NO: 21736 - protein, 10 aa, Artificial Sequence
  Description of Artificial Sequence: Synthetic peptide
SPAEIKNCSF

SEQ ID NO: 21737 - protein, 9 aa, Artificial Sequence
  Description of Artificial Sequence: Synthetic peptide
PPIPVGEIY

SEQ ID NO: 21738 - protein, 10 aa, Artificial Sequence
  Description of Artificial Sequence: Synthetic peptide
TPVRIIKILY

SEQ ID NO: 21739 - protein, 10 aa, Artificial Sequence
  Description of Artificial Sequence: Synthetic peptide
NPPVPVGEIY

SEQ ID NO: 21740 - protein, 10 aa, Artificial Sequence
  Description of Artificial Sequence: Synthetic peptide
NPPIPVGEIY

SEQ ID NO: 21741 - protein, 10 aa, Artificial Sequence
  Description of Artificial Sequence: Synthetic peptide
TAFNNPDCAW

SEQ ID NO: 21742 - protein, 9 aa, Artificial Sequence
  Description of Artificial Sequence: Synthetic peptide
DPNPQEVVL

SEQ ID NO: 21743 - protein, 9 aa, Artificial Sequence
  Description of Artificial Sequence: Synthetic peptide
SAEPVPLQL

SEQ ID NO: 21744 - protein, 9 aa, Artificial Sequence
  Description of Artificial Sequence: Synthetic peptide
FPISPIETV

SEQ ID NO: 21745 - protein, 11 aa, Artificial Sequence
  Description of Artificial Sequence: Synthetic peptide
HGAVTSSNTAF

SEQ ID NO: 21746 - protein, 9 aa, Artificial Sequence
  Description of Artificial Sequence: Synthetic peptide
IPVEPDTVL

SEQ ID NO: 21747 - protein, 9 aa, Artificial Sequence
  Description of Artificial Sequence: Synthetic peptide
DPNPQEVEM

SEQ ID NO: 21748 - protein, 9 aa, Artificial Sequence
  Description of Artificial Sequence: Synthetic peptide
DPNPQEVVL

SEQ ID NO: 21749 - protein, 9 aa, Artificial Sequence
  Description of Artificial Sequence: Synthetic peptide
QPDKSESEL

SEQ ID NO: 21750 - protein, 9 aa, Artificial Sequence
  Description of Artificial Sequence: Synthetic peptide
SAEPVPLQL

SEQ ID NO: 21751 - protein, 9 aa, Artificial Sequence
  Description of Artificial Sequence: Synthetic peptide
FPQGEAREF

SEQ ID NO: 21752 - protein, 9 aa, Artificial Sequence
  Description of Artificial Sequence: Synthetic peptide
VPLTAEAEL

SEQ ID NO: 21753 - protein, 9 aa, Artificial Sequence
  Description of Artificial Sequence: Synthetic peptide
QPDKSESDL

SEQ ID NO: 21754 - protein, 9 aa, Artificial Sequence
  Description of Artificial Sequence: Synthetic peptide
FPISPIETV

SEQ ID NO: 21755 - protein, 9 aa, Artificial Sequence
  Description of Artificial Sequence: Synthetic peptide
IPVEPDTVL

SEQ ID NO: 21756 - protein, 9 aa, Artificial Sequence
  Description of Artificial Sequence: Synthetic peptide
DPNPQEVVL

SEQ ID NO: 21757 - protein, 9 aa, Artificial Sequence
  Description of Artificial Sequence: Synthetic peptide
DPNPQEVEM

SEQ ID NO: 21758 - protein, 9 aa, Artificial Sequence
  Description of Artificial Sequence: Synthetic peptide
VPLTAEAEL

SEQ ID NO: 21759 - protein, 9 aa, Artificial Sequence
  Description of Artificial Sequence: Synthetic peptide
FPISPIETV

SEQ ID NO: 21760 - protein, 9 aa, Artificial Sequence
  Description of Artificial Sequence: Synthetic peptide
FPQGEAREF

SEQ ID NO: 21761 - protein, 9 aa, Artificial Sequence
  Description of Artificial Sequence: Synthetic peptide
SAEPVPLQL

SEQ ID NO: 21762 - protein, 9 aa, Artificial Sequence
  Description of Artificial Sequence: Synthetic peptide
TPQDLNTML

SEQ ID NO: 21763 - protein, 9 aa, Artificial Sequence
  Description of Artificial Sequence: Synthetic peptide
SPAIFQHSM

SEQ ID NO: 21764 - protein, 9 aa, Artificial Sequence
  Description of Artificial Sequence: Synthetic peptide
IVTDSQYAL

SEQ ID NO: 21765 - protein, 10 aa, Artificial Sequence
  Description of Artificial Sequence: Synthetic peptide
SPIETVPVKL

SEQ ID NO: 21766 - protein, 9 aa, Artificial Sequence
  Description of Artificial Sequence: Synthetic peptide
EPIVGAETF

SEQ ID NO: 21767 - protein, 10 aa, Artificial Sequence
  Description of Artificial Sequence: Synthetic peptide
NANPDCKTIL

SEQ ID NO: 21768 - protein, 9 aa, Artificial Sequence
  Description of Artificial Sequence: Synthetic peptide
TPDFWEVQL

SEQ ID NO: 21769 - protein, 11 aa, Artificial Sequence
  Description of Artificial Sequence: Synthetic peptide
VPLTAEAELEL

SEQ ID NO: 21770 - protein, 8 aa, Artificial Sequence
  Description of Artificial Sequence: Synthetic peptide
IPLGDAEL

SEQ ID NO: 21771 - protein, 9 aa, Artificial Sequence
  Description of Artificial Sequence: Synthetic peptide
QPDKSESEL

SEQ ID NO: 21772 - protein, 10 aa, Artificial Sequence
  Description of Artificial Sequence: Synthetic peptide
VPLTVGIIAL

SEQ ID NO: 21773 - protein, 11 aa, Artificial Sequence
  Description of Artificial Sequence: Synthetic peptide
IPAETGQETAY

SEQ ID NO: 21774 - protein, 9 aa, Artificial Sequence
  Description of Artificial Sequence: Synthetic peptide
IPVEPDTVL

SEQ ID NO: 21775 - protein, 9 aa, Artificial Sequence
  Description of Artificial Sequence: Synthetic peptide
FPQGEAREF

SEQ ID NO: 21776 - protein, 9 aa, Artificial Sequence
  Description of Artificial Sequence: Synthetic peptide
DPNPQEVEM

SEQ ID NO: 21777 - protein, 9 aa, Artificial Sequence
  Description of Artificial Sequence: Synthetic peptide
EPIVGAETF

SEQ ID NO: 21778 - protein, 9 aa, Artificial Sequence
  Description of Artificial Sequence: Synthetic peptide
NPDMVLYQY

SEQ ID NO: 21779 - protein, 9 aa, Artificial Sequence
  Description of Artificial Sequence: Synthetic peptide
DAELVVTTY

SEQ ID NO: 21780 - protein, 9 aa, Artificial Sequence
  Description of Artificial Sequence: Synthetic peptide
NPEMVIYQY

SEQ ID NO: 21781 - protein, 9 aa, Artificial Sequence
  Description of Artificial Sequence: Synthetic peptide
TVLDVGDAY

SEQ ID NO: 21782 - protein, 10 aa, Artificial Sequence
  Description of Artificial Sequence: Synthetic peptide
NPPVPVGEIY

SEQ ID NO: 21783 - protein, 9 aa, Artificial Sequence
  Description of Artificial Sequence: Synthetic peptide
DPNPQEVVL

SEQ ID NO: 21784 - protein, 9 aa, Artificial Sequence
  Description of Artificial Sequence: Synthetic peptide
SPAIFQHSM

SEQ ID NO: 21785 - protein, 10 aa, Artificial Sequence
  Description of Artificial Sequence: Synthetic peptide
NPPIPVGEIY

SEQ ID NO: 21786 - protein, 8 aa, Artificial Sequence
  Description of Artificial Sequence: Synthetic peptide
TPGPGIRY

SEQ ID NO: 21787 - protein, 9 aa, Artificial Sequence
  Description of Artificial Sequence: Synthetic peptide
IPVEPDTVL

SEQ ID NO: 21788 - protein, 9 aa, Artificial Sequence
  Description of Artificial Sequence: Synthetic peptide
DPNPQEVEM

SEQ ID NO: 21789 - protein, 9 aa, Artificial Sequence
  Description of Artificial Sequence: Synthetic peptide
DPNPQEVVL

SEQ ID NO: 21790 - protein, 9 aa, Artificial Sequence
  Description of Artificial Sequence: Synthetic peptide
QPDKSESEL

SEQ ID NO: 21791 - protein, 9 aa, Artificial Sequence
  Description of Artificial Sequence: Synthetic peptide
FPQGEAREF

SEQ ID NO: 21792 - protein, 9 aa, Artificial Sequence
  Description of Artificial Sequence: Synthetic peptide
VPLTAEAEL

SEQ ID NO: 21793 - protein, 9 aa, Artificial Sequence
  Description of Artificial Sequence: Synthetic peptide
SAEPVPLQL

SEQ ID NO: 21794 - protein, 9 aa, Artificial Sequence
  Description of Artificial Sequence: Synthetic peptide
QPDKSESDL

SEQ ID NO: 21795 - protein, 9 aa, Artificial Sequence
  Description of Artificial Sequence: Synthetic peptide
TPDFWEVQL

SEQ ID NO: 21796 - protein, 9 aa, Artificial Sequence
  Description of Artificial Sequence: Synthetic peptide
FPISPIETV

SEQ ID NO: 21797 - protein, 8 aa, Artificial Sequence
  Description of Artificial Sequence: Synthetic peptide
IPLGDAEL

SEQ ID NO: 21798 - protein, 9 aa, Artificial Sequence
  Description of Artificial Sequence: Synthetic peptide
HIPLGDAEL

SEQ ID NO: 21799 - protein, 9 aa, Artificial Sequence
  Description of Artificial Sequence: Synthetic peptide
EPIVGAETF

SEQ ID NO: 21800 - protein, 9 aa, Artificial Sequence
  Description of Artificial Sequence: Synthetic peptide
QDLARHGAV

SEQ ID NO: 21801 - protein, 8 aa, Artificial Sequence
  Description of Artificial Sequence: Synthetic peptide
MENVTENF

SEQ ID NO: 21802 - protein, 9 aa, Artificial Sequence
  Description of Artificial Sequence: Synthetic peptide
TDEIKNCSF

SEQ ID NO: 21803 - protein, 8 aa, Artificial Sequence
  Description of Artificial Sequence: Synthetic peptide
AEHLKTAV

SEQ ID NO: 21804 - protein, 8 aa, Artificial Sequence
  Description of Artificial Sequence: Synthetic peptide
ADQLIHIY

SEQ ID NO: 21805 - protein, 8 aa, Artificial Sequence
  Description of Artificial Sequence: Synthetic peptide
KEATTTLF

SEQ ID NO: 21806 - protein, 8 aa, Artificial Sequence
  Description of Artificial Sequence: Synthetic peptide
YETEVHNV

SEQ ID NO: 21807 - protein, 8 aa, Artificial Sequence
  Description of Artificial Sequence: Synthetic peptide
LENVTENF

SEQ ID NO: 21808 - protein, 9 aa, Artificial Sequence
  Description of Artificial Sequence: Synthetic peptide
TEVVQKVAM

SEQ ID NO: 21809 - protein, 9 aa, Artificial Sequence
  Description of Artificial Sequence: Synthetic peptide
IHTDNGTNF

SEQ ID NO: 21810 - protein, 10 aa, Artificial Sequence
  Description of Artificial Sequence: Synthetic peptide
EHFKNGTITF

SEQ ID NO: 21811 - protein, 9 aa, Artificial Sequence
  Description of Artificial Sequence: Synthetic peptide
IHTDNGSNF

SEQ ID NO: 21812 - protein, 9 aa, Artificial Sequence
  Description of Artificial Sequence: Synthetic peptide
QRQGTEPSF

SEQ ID NO: 21813 - protein, 11 aa, Artificial Sequence
  Description of Artificial Sequence: Synthetic peptide
TQVDPGLADQL

SEQ ID NO: 21814 - protein, 9 aa, Artificial Sequence
  Description of Artificial Sequence: Synthetic peptide
EQSPPLTSL

SEQ ID NO: 21815 - protein, 9 aa, Artificial Sequence
  Description of Artificial Sequence: Synthetic peptide
TQDFWEVQL

SEQ ID NO: 21816 - protein, 9 aa, Artificial Sequence
  Description of Artificial Sequence: Synthetic peptide
YRTQVDPGL

SEQ ID NO: 21817 - protein, 9 aa, Artificial Sequence
  Description of Artificial Sequence: Synthetic peptide
NHTSTIYRL

SEQ ID NO: 21818 - protein, 9 aa, Artificial Sequence
  Description of Artificial Sequence: Synthetic peptide
EQGPPLTSL

SEQ ID NO: 21819 - protein, 9 aa, Artificial Sequence
  Description of Artificial Sequence: Synthetic peptide
GHQAAMQML

SEQ ID NO: 21820 - protein, 11 aa, Artificial Sequence
  Description of Artificial Sequence: Synthetic peptide
GHLILGNIDNL

SEQ ID NO: 21821 - protein, 10 aa, Artificial Sequence
  Description of Artificial Sequence: Synthetic peptide
VHIPLGDAEL

SEQ ID NO: 21822 - protein, 9 aa, Artificial Sequence
  Description of Artificial Sequence: Synthetic peptide
THLEGKIIL

SEQ ID NO: 21823 - protein, 9 aa, Artificial Sequence
  Description of Artificial Sequence: Synthetic peptide
AHTNDVKQL

SEQ ID NO: 21824 - protein, 9 aa, Artificial Sequence
  Description of Artificial Sequence: Synthetic peptide
EHLKTAVQM

SEQ ID NO: 21825 - protein, 9 aa, Artificial Sequence
  Description of Artificial Sequence: Synthetic peptide
TQVGSLQYL

SEQ ID NO: 21826 - protein, 11 aa, Artificial Sequence
  Description of Artificial Sequence: Synthetic peptide
TQVEPDLADQL

SEQ ID NO: 21827 - protein, 9 aa, Artificial Sequence
  Description of Artificial Sequence: Synthetic peptide
SQVTNPVVM

SEQ ID NO: 21828 - protein, 9 aa, Artificial Sequence
  Description of Artificial Sequence: Synthetic peptide
YRTQVEPDL

SEQ ID NO: 21829 - protein, 9 aa, Artificial Sequence
  Description of Artificial Sequence: Synthetic peptide
SQVTNPVVM

SEQ ID NO: 21830 - protein, 9 aa, Artificial Sequence
  Description of Artificial Sequence: Synthetic peptide
YRTQVEPDL

SEQ ID NO: 21831 - protein, 9 aa, Artificial Sequence
  Description of Artificial Sequence: Synthetic peptide
EQSPPLTSL

SEQ ID NO: 21832 - protein, 9 aa, Artificial Sequence
  Description of Artificial Sequence: Synthetic peptide
EQGPPLTSL

SEQ ID NO: 21833 - protein, 11 aa, Artificial Sequence
  Description of Artificial Sequence: Synthetic peptide
TQVDPGLADQL

SEQ ID NO: 21834 - protein, 9 aa, Artificial Sequence
  Description of Artificial Sequence: Synthetic peptide
YRTQVDPGL

SEQ ID NO: 21835 - protein, 9 aa, Artificial Sequence
  Description of Artificial Sequence: Synthetic peptide
QRQGTEPSF

SEQ ID NO: 21836 - protein, 9 aa, Artificial Sequence
  Description of Artificial Sequence: Synthetic peptide
SQVTNSAVM

SEQ ID NO: 21837 - protein, 9 aa, Artificial Sequence
  Description of Artificial Sequence: Synthetic peptide
EHLKTAVQM

SEQ ID NO: 21838 - protein, 9 aa, Artificial Sequence
  Description of Artificial Sequence: Synthetic peptide
IHTDNGTNF

SEQ ID NO: 21839 - protein, 8 aa, Artificial Sequence
  Description of Artificial Sequence: Synthetic peptide
MHTDIISL

SEQ ID NO: 21840 - protein, 10 aa, Artificial Sequence
  Description of Artificial Sequence: Synthetic peptide
EHFKNGTITF

SEQ ID NO: 21841 - protein, 9 aa, Artificial Sequence
  Description of Artificial Sequence: Synthetic peptide
GQKAIGTVL

SEQ ID NO: 21842 - protein, 11 aa, Artificial Sequence
  Description of Artificial Sequence: Synthetic peptide
TQVEPDLADQL

SEQ ID NO: 21843 - protein, 9 aa, Artificial Sequence
  Description of Artificial Sequence: Synthetic peptide
IHTDNGSNF

SEQ ID NO: 21844 - protein, 9 aa, Artificial Sequence
  Description of Artificial Sequence: Synthetic peptide
ERSGTGSSF

SEQ ID NO: 21845 - protein, 9 aa, Artificial Sequence
  Description of Artificial Sequence: Synthetic peptide
DRVGTQPAA

SEQ ID NO: 21846 - protein, 9 aa, Artificial Sequence
  Description of Artificial Sequence: Synthetic peptide
EQVDKLVSA

SEQ ID NO: 21847 - protein, 10 aa, Artificial Sequence
  Description of Artificial Sequence: Synthetic peptide
SQYALGIIQA

SEQ ID NO: 21848 - protein, 8 aa, Artificial Sequence
  Description of Artificial Sequence: Synthetic peptide
SQVTNPVV

SEQ ID NO: 21849 - protein, 8 aa, Artificial Sequence
  Description of Artificial Sequence: Synthetic peptide
WQRPVVTV

SEQ ID NO: 21850 - protein, 9 aa, Artificial Sequence
  Description of Artificial Sequence: Synthetic peptide
VQLGIPHPA

SEQ ID NO: 21851 - protein, 8 aa, Artificial Sequence
  Description of Artificial Sequence: Synthetic peptide
THGIKPVV

SEQ ID NO: 21852 - protein, 8 aa, Artificial Sequence
  Description of Artificial Sequence: Synthetic peptide
QRTTTPYA

SEQ ID NO: 21853 - protein, 8 aa, Artificial Sequence
  Description of Artificial Sequence: Synthetic peptide
TDIVPLTA

SEQ ID NO: 21854 - protein, 9 aa, Artificial Sequence
  Description of Artificial Sequence: Synthetic peptide
QRPVVTVKV

SEQ ID NO: 21855 - protein, 8 aa, Artificial Sequence
  Description of Artificial Sequence: Synthetic peptide
SQVTNSAV

SEQ ID NO: 21856 - protein, 8 aa, Artificial Sequence
  Description of Artificial Sequence: Synthetic peptide
TEVVQKVA

SEQ ID NO: 21857 - protein, 9 aa, Artificial Sequence
  Description of Artificial Sequence: Synthetic peptide
QRPIVTIKV

SEQ ID NO: 21858 - protein, 9 aa, Artificial Sequence
  Description of Artificial Sequence: Synthetic peptide
QQHLLQLTV

SEQ ID NO: 21859 - protein, 8 aa, Artificial Sequence
  Description of Artificial Sequence: Synthetic peptide
MHTDIISL

SEQ ID NO: 21860 - protein, 8 aa, Artificial Sequence
  Description of Artificial Sequence: Synthetic peptide
SQRVLSSC

SEQ ID NO: 21861 - protein, 8 aa, Artificial Sequence
  Description of Artificial Sequence: Synthetic peptide
DQVLIEIC

SEQ ID NO: 21862 - protein, 10 aa, Artificial Sequence
  Description of Artificial Sequence: Synthetic peptide
KEQSPPLTSL

SEQ ID NO: 21863 - protein, 10 aa, Artificial Sequence
  Description of Artificial Sequence: Synthetic peptide
IEVKDTKEAL

SEQ ID NO: 21864 - protein, 10 aa, Artificial Sequence
  Description of Artificial Sequence: Synthetic peptide
TETTNQKAEL

SEQ ID NO: 21865 - protein, 10 aa, Artificial Sequence
  Description of Artificial Sequence: Synthetic peptide
TETTNQKTEL

SEQ ID NO: 21866 - protein, 10 aa, Artificial Sequence
  Description of Artificial Sequence: Synthetic peptide
QEQGPPLTSL

SEQ ID NO: 21867 - protein, 9 aa, Artificial Sequence
  Description of Artificial Sequence: Synthetic peptide
MEDEHREVL

SEQ ID NO: 21868 - protein, 9 aa, Artificial Sequence
  Description of Artificial Sequence: Synthetic peptide
TEVVQKVAM

SEQ ID NO: 21869 - protein, 9 aa, Artificial Sequence
  Description of Artificial Sequence: Synthetic peptide
YESNPYPNL

SEQ ID NO: 21870 - protein, 10 aa, Artificial Sequence
  Description of Artificial Sequence: Synthetic peptide
KEIGNYSDTI

SEQ ID NO: 21871 - protein, 9 aa, Artificial Sequence
  Description of Artificial Sequence: Synthetic peptide
SEGATPQDL

SEQ ID NO: 21872 - protein, 10 aa, Artificial Sequence
  Description of Artificial Sequence: Synthetic peptide
QEIKNSAINL

SEQ ID NO: 21873 - protein, 11 aa, Artificial Sequence
  Description of Artificial Sequence: Synthetic peptide
NETGENGTITL

SEQ ID NO: 21874 - protein, 8 aa, Artificial Sequence
  Description of Artificial Sequence: Synthetic peptide
IETVPVKL

SEQ ID NO: 21875 - protein, 9 aa, Artificial Sequence
  Description of Artificial Sequence: Synthetic peptide
MEDEHREIL

SEQ ID NO: 21876 - protein, 10 aa, Artificial Sequence
  Description of Artificial Sequence: Synthetic peptide
QELKNSAISL

SEQ ID NO: 21877 - protein, 11 aa, Artificial Sequence
  Description of Artificial Sequence: Synthetic peptide
QEIKNSAINLL

SEQ ID NO: 21878 - protein, 8 aa, Artificial Sequence
  Description of Artificial Sequence: Synthetic peptide
GENGTITL

SEQ ID NO: 21879 - protein, 9 aa, Artificial Sequence
  Description of Artificial Sequence: Synthetic peptide
SESAIRKAL

SEQ ID NO: 21880 - protein, 9 aa, Artificial Sequence
  Description of Artificial Sequence: Synthetic peptide
QEKNEQDLL

SEQ ID NO: 21881 - protein, 10 aa, Artificial Sequence
  Description of Artificial Sequence: Synthetic peptide
IEAQQQMLQL

SEQ ID NO: 21882 - protein, 10 aa, Artificial Sequence
  Description of Artificial Sequence: Synthetic peptide
IEAQQHLLQL

SEQ ID NO: 21883 - protein, 10 aa, Artificial Sequence
  Description of Artificial Sequence: Synthetic peptide
AEHLKTAVQM

SEQ ID NO: 21884 - protein, 9 aa, Artificial Sequence
  Description of Artificial Sequence: Synthetic peptide
VEPDLADQL

SEQ ID NO: 21885 - protein, 8 aa, Artificial Sequence
  Description of Artificial Sequence: Synthetic peptide
AELQAICL

SEQ ID NO: 21886 - protein, 8 aa, Artificial Sequence
  Description of Artificial Sequence: Synthetic peptide
IEAQQHLL

SEQ ID NO: 21887 - protein, 8 aa, Artificial Sequence
  Description of Artificial Sequence: Synthetic peptide
GETGHLIL

SEQ ID NO: 21888 - protein, 9 aa, Artificial Sequence
  Description of Artificial Sequence: Synthetic peptide
SESDLVNQI

SEQ ID NO: 21889 - protein, 9 aa, Artificial Sequence
  Description of Artificial Sequence: Synthetic peptide
TEVVQKVAM

SEQ ID NO: 21890 - protein, 8 aa, Artificial Sequence
  Description of Artificial Sequence: Synthetic peptide
GEKITPSL

SEQ ID NO: 21891 - protein, 10 aa, Artificial Sequence
  Description of Artificial Sequence: Synthetic peptide
QEQGPPLTSL

SEQ ID NO: 21892 - protein, 10 aa, Artificial Sequence
  Description of Artificial Sequence: Synthetic peptide
KEQSPPLTSL

SEQ ID NO: 21893 - protein, 10 aa, Artificial Sequence
  Description of Artificial Sequence: Synthetic peptide
TETTNQKTEL

SEQ ID NO: 21894 - protein, 9 aa, Artificial Sequence
  Description of Artificial Sequence: Synthetic peptide
YESNPYPNL

SEQ ID NO: 21895 - protein, 8 aa, Artificial Sequence
  Description of Artificial Sequence: Synthetic peptide
TDIQTKEL

SEQ ID NO: 21896 - protein, 10 aa, Artificial Sequence
  Description of Artificial Sequence: Synthetic peptide
TETTNQKAEL

SEQ ID NO: 21897 - protein, 10 aa, Artificial Sequence
  Description of Artificial Sequence: Synthetic peptide
AEHLKTAVQM

SEQ ID NO: 21898 - protein, 11 aa, Artificial Sequence
  Description of Artificial Sequence: Synthetic peptide
QEIKNSAINLL

SEQ ID NO: 21899 - protein, 9 aa, Artificial Sequence
  Description of Artificial Sequence: Synthetic peptide
MEDEHREVL

SEQ ID NO: 21900 - protein, 9 aa, Artificial Sequence
  Description of Artificial Sequence: Synthetic peptide
SESAIRKAL

SEQ ID NO: 21901 - protein, 10 aa, Artificial Sequence
  Description of Artificial Sequence: Synthetic peptide
IEVKDTKEAL

SEQ ID NO: 21902 - protein, 8 aa, Artificial Sequence
  Description of Artificial Sequence: Synthetic peptide
AELQAICL

SEQ ID NO: 21903 - protein, 10 aa, Artificial Sequence
  Description of Artificial Sequence: Synthetic peptide
IEAQQHLLQL

SEQ ID NO: 21904 - protein, 8 aa, Artificial Sequence
  Description of Artificial Sequence: Synthetic peptide
IETVPVKL

SEQ ID NO: 21905 - protein, 9 aa, Artificial Sequence
  Description of Artificial Sequence: Synthetic peptide
YETEVHNVW

SEQ ID NO: 21906 - protein, 10 aa, Artificial Sequence
  Description of Artificial Sequence: Synthetic peptide
QELKNSAISL

SEQ ID NO: 21907 - protein, 11 aa, Artificial Sequence
  Description of Artificial Sequence: Synthetic peptide
NETGENGTITL

SEQ ID NO: 21908 - protein, 8 aa, Artificial Sequence
  Description of Artificial Sequence: Synthetic peptide
TELQAIHL

SEQ ID NO: 21909 - protein, 8 aa, Artificial Sequence
  Description of Artificial Sequence: Synthetic peptide
IEAQQQML

SEQ ID NO: 21910 - protein, 8 aa, Artificial Sequence
  Description of Artificial Sequence: Synthetic peptide
GENGTITL

SEQ ID NO: 21911 - protein, 10 aa, Artificial Sequence
  Description of Artificial Sequence: Synthetic peptide
QEIKNSAINL

SEQ ID NO: 21912 - protein, 8 aa, Artificial Sequence
  Description of Artificial Sequence: Synthetic peptide
IEAQQHLL

SEQ ID NO: 21913 - protein, 10 aa, Artificial Sequence
  Description of Artificial Sequence: Synthetic peptide
IEAQQQMLQL

SEQ ID NO: 21914 - protein, 9 aa, Artificial Sequence
  Description of Artificial Sequence: Synthetic peptide
SDFNLPPVV

SEQ ID NO: 21915 - protein, 8 aa, Artificial Sequence
  Description of Artificial Sequence: Synthetic peptide
GETGHLIL

SEQ ID NO: 21916 - protein, 11 aa, Artificial Sequence
  Description of Artificial Sequence: Synthetic peptide
SELVNQIIEQL

SEQ ID NO: 21917 - protein, 9 aa, Artificial Sequence
  Description of Artificial Sequence: Synthetic peptide
SEGATPQDL

SEQ ID NO: 21918 - protein, 10 aa, Artificial Sequence
  Description of Artificial Sequence: Synthetic peptide
KEIGNYSDTI

SEQ ID NO: 21919 - protein, 9 aa, Artificial Sequence
  Description of Artificial Sequence: Synthetic peptide
SESDLVNQI

SEQ ID NO: 21920 - protein, 9 aa, Artificial Sequence
  Description of Artificial Sequence: Synthetic peptide
LETEPIVGA

SEQ ID NO: 21921 - protein, 8 aa, Artificial Sequence
  Description of Artificial Sequence: Synthetic peptide
YETEVHNV

SEQ ID NO: 21922 - protein, 9 aa, Artificial Sequence
  Description of Artificial Sequence: Synthetic peptide
SESELVNQI

SEQ ID NO: 21923 - protein, 10 aa, Artificial Sequence
  Description of Artificial Sequence: Synthetic peptide
KEISNHTSTI

SEQ ID NO: 21924 - protein, 8 aa, Artificial Sequence
  Description of Artificial Sequence: Synthetic peptide
AELVVTTY

SEQ ID NO: 21925 - protein, 10 aa, Artificial Sequence
  Description of Artificial Sequence: Synthetic peptide
REFSSEQTRA

SEQ ID NO: 21926 - protein, 9 aa, Artificial Sequence
  Description of Artificial Sequence: Synthetic peptide
LETEPIVGA

SEQ ID NO: 21927 - protein, 8 aa, Artificial Sequence
  Description of Artificial Sequence: Synthetic peptide
TEVVQKVA

SEQ ID NO: 21928 - protein, 9 aa, Artificial Sequence
  Description of Artificial Sequence: Synthetic peptide
GENGTITLP

SEQ ID NO: 21929 - protein, 9 aa, Artificial Sequence
  Description of Artificial Sequence: Synthetic peptide
TELQAIHLA

SEQ ID NO: 21930 - protein, 9 aa, Artificial Sequence
  Description of Artificial Sequence: Synthetic peptide
TETLLVQNA

SEQ ID NO: 21931 - protein, 9 aa, Artificial Sequence
  Description of Artificial Sequence: Synthetic peptide
EEVGFPVRP

SEQ ID NO: 21932 - protein, 11 aa, Artificial Sequence
  Description of Artificial Sequence: Synthetic peptide
REVLASQQREA

SEQ ID NO: 21933 - protein, 11 aa, Artificial Sequence
  Description of Artificial Sequence: Synthetic peptide
AEAMSQVTNSA

SEQ ID NO: 21934 - protein, 9 aa, Artificial Sequence
  Description of Artificial Sequence: Synthetic peptide
IEVKDTKEA

SEQ ID NO: 21935 - protein, 9 aa, Artificial Sequence
  Description of Artificial Sequence: Synthetic peptide
QEFGIPYNP

SEQ ID NO: 21936 - protein, 9 aa, Artificial Sequence
  Description of Artificial Sequence: Synthetic peptide
GELGSPQIP

SEQ ID NO: 21937 - protein, 10 aa, Artificial Sequence
  Description of Artificial Sequence: Synthetic peptide
SDFNLPPVVA

SEQ ID NO: 21938 - protein, 8 aa, Artificial Sequence
  Description of Artificial Sequence: Synthetic peptide
SESAIRKA

SEQ ID NO: 21939 - protein, 9 aa, Artificial Sequence
  Description of Artificial Sequence: Synthetic peptide
AELQAICLA

SEQ ID NO: 21940 - protein, 10 aa, Artificial Sequence
  Description of Artificial Sequence: Synthetic peptide
KEATPTLFCA

SEQ ID NO: 21941 - protein, 9 aa, Artificial Sequence
  Description of Artificial Sequence: Synthetic peptide
TEVVQKVAM

SEQ ID NO: 21942 - protein, 8 aa, Artificial Sequence
  Description of Artificial Sequence: Synthetic peptide
GEKITPSL

SEQ ID NO: 21943 - protein, 9 aa, Artificial Sequence
  Description of Artificial Sequence: Synthetic peptide
SESAIRKAL

SEQ ID NO: 21944 - protein, 10 aa, Artificial Sequence
  Description of Artificial Sequence: Synthetic peptide
QEQGPPLTSL

SEQ ID NO: 21945 - protein, 9 aa, Artificial Sequence
  Description of Artificial Sequence: Synthetic peptide
MEDEHREVL

SEQ ID NO: 21946 - protein, 10 aa, Artificial Sequence
  Description of Artificial Sequence: Synthetic peptide
KEQSPPLTSL

SEQ ID NO: 21947 - protein, 8 aa, Artificial Sequence
  Description of Artificial Sequence: Synthetic peptide
TDIQTKEL

SEQ ID NO: 21948 - protein, 8 aa, Artificial Sequence
  Description of Artificial Sequence: Synthetic peptide
AELQAICL

SEQ ID NO: 21949 - protein, 8 aa, Artificial Sequence
  Description of Artificial Sequence: Synthetic peptide
AEHLKTAV

SEQ ID NO: 21950 - protein, 9 aa, Artificial Sequence
  Description of Artificial Sequence: Synthetic peptide
SESAVRKAI

SEQ ID NO: 21951 - protein, 9 aa, Artificial Sequence
  Description of Artificial Sequence: Synthetic peptide
GEQDKNRSV

SEQ ID NO: 21952 - protein, 8 aa, Artificial Sequence
  Description of Artificial Sequence: Synthetic peptide
IEAQQQML

SEQ ID NO: 21953 - protein, 10 aa, Artificial Sequence
  Description of Artificial Sequence: Synthetic peptide
TETTNQKTEL

SEQ ID NO: 21954 - protein, 9 aa, Artificial Sequence
  Description of Artificial Sequence: Synthetic peptide
YESNPYPNL

SEQ ID NO: 21955 - protein, 8 aa, Artificial Sequence
  Description of Artificial Sequence: Synthetic peptide
SERQANFL

SEQ ID NO: 21956 - protein, 9 aa, Artificial Sequence
  Description of Artificial Sequence: Synthetic peptide
MEDEHREIL

SEQ ID NO: 21957 - protein, 8 aa, Artificial Sequence
  Description of Artificial Sequence: Synthetic peptide
IEAQQHLL

SEQ ID NO: 21958 - protein, 9 aa, Artificial Sequence
  Description of Artificial Sequence: Synthetic peptide
QEKNEQDLL

SEQ ID NO: 21959 - protein, 8 aa, Artificial Sequence
  Description of Artificial Sequence: Synthetic peptide
REISQRVL

SEQ ID NO: 21960 - protein, 9 aa, Artificial Sequence
  Description of Artificial Sequence: Synthetic peptide
YETEVHNVW

SEQ ID NO: 21961 - protein, 8 aa, Artificial Sequence
  Description of Artificial Sequence: Synthetic peptide
TELQAIHL

SEQ ID NO: 21962 - protein, 10 aa, Artificial Sequence
  Description of Artificial Sequence: Synthetic peptide
TETTNQKAEL

SEQ ID NO: 21963 - protein, 10 aa, Artificial Sequence
  Description of Artificial Sequence: Synthetic peptide
AEHLKTAVQM

SEQ ID NO: 21964 - protein, 8 aa, Artificial Sequence
  Description of Artificial Sequence: Synthetic peptide
TERQANFL

SEQ ID NO: 21965 - protein, 8 aa, Artificial Sequence
  Description of Artificial Sequence: Synthetic peptide
GENGTITL

SEQ ID NO: 21966 - protein, 8 aa, Artificial Sequence
  Description of Artificial Sequence: Synthetic peptide
GERIVDII

SEQ ID NO: 21967 - protein, 8 aa, Artificial Sequence
  Description of Artificial Sequence: Synthetic peptide
GQMVHQAL

SEQ ID NO: 21968 - protein, 10 aa, Artificial Sequence
  Description of Artificial Sequence: Synthetic peptide
SESAVRKAIL

SEQ ID NO: 21969 - protein, 9 aa, Artificial Sequence
  Description of Artificial Sequence: Synthetic peptide
KEKGGLDGL

SEQ ID NO: 21970 - protein, 9 aa, Artificial Sequence
  Description of Artificial Sequence: Synthetic peptide
SERLLSACL

SEQ ID NO: 21971 - protein, 9 aa, Artificial Sequence
  Description of Artificial Sequence: Synthetic peptide
TEMEKEGKI

SEQ ID NO: 21972 - protein, 8 aa, Artificial Sequence
  Description of Artificial Sequence: Synthetic peptide
AELVVTTY

SEQ ID NO: 21973 - protein, 9 aa, Artificial Sequence
  Description of Artificial Sequence: Synthetic peptide
GEQDKDRSV

SEQ ID NO: 21974 - protein, 10 aa, Artificial Sequence
  Description of Artificial Sequence: Synthetic peptide
QELKNSAISL

SEQ ID NO: 21975 - protein, 10 aa, Artificial Sequence
  Description of Artificial Sequence: Synthetic peptide
QEIKNSAINL

SEQ ID NO: 21976 - protein, 11 aa, Artificial Sequence
  Description of Artificial Sequence: Synthetic peptide
AEQATQEVKNW

SEQ ID NO: 21977 - protein, 9 aa, Artificial Sequence
  Description of Artificial Sequence: Synthetic peptide
YETEVHNVW

SEQ ID NO: 21978 - protein, 9 aa, Artificial Sequence
  Description of Artificial Sequence: Synthetic peptide
SESAIRKAL

SEQ ID NO: 21979 - protein, 9 aa, Artificial Sequence
  Description of Artificial Sequence: Synthetic peptide
EEINLPGKW

SEQ ID NO: 21980 - protein, 11 aa, Artificial Sequence
  Description of Artificial Sequence: Synthetic peptide
SEVNIVTDSQY

SEQ ID NO: 21981 - protein, 9 aa, Artificial Sequence
  Description of Artificial Sequence: Synthetic peptide
AELVVTTYW

SEQ ID NO: 21982 - protein, 11 aa, Artificial Sequence
  Description of Artificial Sequence: Synthetic peptide
AEIQKQGNDQW

SEQ ID NO: 21983 - protein, 10 aa, Artificial Sequence
  Description of Artificial Sequence: Synthetic peptide
QEQGPPLTSL

SEQ ID NO: 21984 - protein, 9 aa, Artificial Sequence
  Description of Artificial Sequence: Synthetic peptide
SESAVRKAI

SEQ ID NO: 21985 - protein, 11 aa, Artificial Sequence
  Description of Artificial Sequence: Synthetic peptide
NEQDLLALDKW

SEQ ID NO: 21986 - protein, 10 aa, Artificial Sequence
  Description of Artificial Sequence: Synthetic peptide
NETPGVRYQY

SEQ ID NO: 21987 - protein, 9 aa, Artificial Sequence
  Description of Artificial Sequence: Synthetic peptide
EEIWNNMTW

SEQ ID NO: 21988 - protein, 9 aa, Artificial Sequence
  Description of Artificial Sequence: Synthetic peptide
SEIWENMTW

SEQ ID NO: 21989 - protein, 10 aa, Artificial Sequence
  Description of Artificial Sequence: Synthetic peptide
NETPGIRYQY

SEQ ID NO: 21990 - protein, 9 aa, Artificial Sequence
  Description of Artificial Sequence: Synthetic peptide
SESDLVNQI

SEQ ID NO: 21991 - protein, 10 aa, Artificial Sequence
  Description of Artificial Sequence: Synthetic peptide
VEMENVTENF

SEQ ID NO: 21992 - protein, 9 aa, Artificial Sequence
  Description of Artificial Sequence: Synthetic peptide
AETGQETAY

SEQ ID NO: 21993 - protein, 11 aa, Artificial Sequence
  Description of Artificial Sequence: Synthetic peptide
SEVNIVTDSQY

SEQ ID NO: 21994 - protein, 9 aa, Artificial Sequence
  Description of Artificial Sequence: Synthetic peptide
YETEVHNVW

SEQ ID NO: 21995 - protein, 9 aa, Artificial Sequence
  Description of Artificial Sequence: Synthetic peptide
EEINLPGKW

SEQ ID NO: 21996 - protein, 11 aa, Artificial Sequence
  Description of Artificial Sequence: Synthetic peptide
AEQATQEVKNW

SEQ ID NO: 21997 - protein, 9 aa, Artificial Sequence
  Description of Artificial Sequence: Synthetic peptide
SESAIRKAL

SEQ ID NO: 21998 - protein, 11 aa, Artificial Sequence
  Description of Artificial Sequence: Synthetic peptide
AEIQKQGNDQW

SEQ ID NO: 21999 - protein, 9 aa, Artificial Sequence
  Description of Artificial Sequence: Synthetic peptide
SESAVRKAI

SEQ ID NO: 22000 - protein, 9 aa, Artificial Sequence
  Description of Artificial Sequence: Synthetic peptide
AELVVTTYW

SEQ ID NO: 22001 - protein, 9 aa, Artificial Sequence
  Description of Artificial Sequence: Synthetic peptide
SESDLVNQI

SEQ ID NO: 22002 - protein, 10 aa, Artificial Sequence
  Description of Artificial Sequence: Synthetic peptide
NETPGIRYQY

SEQ ID NO: 22003 - protein, 10 aa, Artificial Sequence
  Description of Artificial Sequence: Synthetic peptide
NETPGVRYQY

SEQ ID NO: 22004 - protein, 11 aa, Artificial Sequence
  Description of Artificial Sequence: Synthetic peptide
NEQDLLALDKW

SEQ ID NO: 22005 - protein, 9 aa, Artificial Sequence
  Description of Artificial Sequence: Synthetic peptide
SESELVNQI

SEQ ID NO: 22006 - protein, 9 aa, Artificial Sequence
  Description of Artificial Sequence: Synthetic peptide
SEIWENMTW

SEQ ID NO: 22007 - protein, 10 aa, Artificial Sequence
  Description of Artificial Sequence: Synthetic peptide
QEQGPPLTSL

SEQ ID NO: 22008 - protein, 10 aa, Artificial Sequence
  Description of Artificial Sequence: Synthetic peptide
VEMENVTENF

SEQ ID NO: 22009 - protein, 9 aa, Artificial Sequence
  Description of Artificial Sequence: Synthetic peptide
EEIWNNMTW

SEQ ID NO: 22010 - protein, 10 aa, Artificial Sequence
  Description of Artificial Sequence: Synthetic peptide
EEIKSLYNTI

SEQ ID NO: 22011 - protein, 11 aa, Artificial Sequence
  Description of Artificial Sequence: Synthetic peptide
AEIQKQGHGQW

SEQ ID NO: 22012 - protein, 9 aa, Artificial Sequence
  Description of Artificial Sequence: Synthetic peptide
AETGQETAY

SEQ ID NO: 22013 - protein, 9 aa, Artificial Sequence
  Description of Artificial Sequence: Synthetic peptide
TEMEKEGKI

SEQ ID NO: 22014 - protein, 8 aa, Artificial Sequence
  Description of Artificial Sequence: Synthetic peptide
AELVVTTY

SEQ ID NO: 22015 - protein, 9 aa, Artificial Sequence
  Description of Artificial Sequence: Synthetic peptide
DEHREVLKW

SEQ ID NO: 22016 - protein, 8 aa, Artificial Sequence
  Description of Artificial Sequence: Synthetic peptide
NETPGVRY

SEQ ID NO: 22017 - protein, 10 aa, Artificial Sequence
  Description of Artificial Sequence: Synthetic peptide
EEHEKYHNNW

SEQ ID NO: 22018 - protein, 10 aa, Artificial Sequence
  Description of Artificial Sequence: Synthetic peptide
AETGQETAYF

SEQ ID NO: 22019 - protein, 9 aa, Artificial Sequence
  Description of Artificial Sequence: Synthetic peptide
YEKEVHNVW

SEQ ID NO: 22020 - protein, 10 aa, Artificial Sequence
  Description of Artificial Sequence: Synthetic peptide
RETKQGKAGY

SEQ ID NO: 22021 - protein, 8 aa, Artificial Sequence
  Description of Artificial Sequence: Synthetic peptide
NETPGIRY

SEQ ID NO: 22022 - protein, 10 aa, Artificial Sequence
  Description of Artificial Sequence: Synthetic peptide
KEQSPPLTSL

SEQ ID NO: 22023 - protein, 9 aa, Artificial Sequence
  Description of Artificial Sequence: Synthetic peptide
YESNPYPNL

SEQ ID NO: 22024 - protein, 9 aa, Artificial Sequence
  Description of Artificial Sequence: Synthetic peptide
TEVVQKVAM

SEQ ID NO: 22025 - protein, 10 aa, Artificial Sequence
  Description of Artificial Sequence: Synthetic peptide
QEQGPPLTSL

SEQ ID NO: 22026 - protein, 11 aa, Artificial Sequence
  Description of Artificial Sequence: Synthetic peptide
AEIQKQGNDQW

SEQ ID NO: 22027 - protein, 10 aa, Artificial Sequence
  Description of Artificial Sequence: Synthetic peptide
KEQSPPLTSL

SEQ ID NO: 22028 - protein, 11 aa, Artificial Sequence
  Description of Artificial Sequence: Synthetic peptide
QEIKNSAINLL

SEQ ID NO: 22029 - protein, 10 aa, Artificial Sequence
  Description of Artificial Sequence: Synthetic peptide
EEIKSLYNTI

SEQ ID NO: 22030 - protein, 11 aa, Artificial Sequence
  Description of Artificial Sequence: Synthetic peptide
AEQATQEVKNW

SEQ ID NO: 22031 - protein, 10 aa, Artificial Sequence
  Description of Artificial Sequence: Synthetic peptide
VEMENVTENF

SEQ ID NO: 22032 - protein, 9 aa, Artificial Sequence
  Description of Artificial Sequence: Synthetic peptide
TEVVQKVAM

SEQ ID NO: 22033 - protein, 11 aa, Artificial Sequence
  Description of Artificial Sequence: Synthetic peptide
SEVNIVTDSQY

SEQ ID NO: 22034 - protein, 10 aa, Artificial Sequence
  Description of Artificial Sequence: Synthetic peptide
AETGQETAYF

SEQ ID NO: 22035 - protein, 9 aa, Artificial Sequence
  Description of Artificial Sequence: Synthetic peptide
EEINLPGKW

SEQ ID NO: 22036 - protein, 10 aa, Artificial Sequence
  Description of Artificial Sequence: Synthetic peptide
TETTNQKTEL

SEQ ID NO: 22037 - protein, 10 aa, Artificial Sequence
  Description of Artificial Sequence: Synthetic peptide
TETTNQKAEL

SEQ ID NO: 22038 - protein, 10 aa, Artificial Sequence
  Description of Artificial Sequence: Synthetic peptide
QEIKNSAINL

SEQ ID NO: 22039 - protein, 9 aa, Artificial Sequence
  Description of Artificial Sequence: Synthetic peptide
YETEVHNVW

SEQ ID NO: 22040 - protein, 10 aa, Artificial Sequence
  Description of Artificial Sequence: Synthetic peptide
KEISNHTSTI

SEQ ID NO: 22041 - protein, 9 aa, Artificial Sequence
  Description of Artificial Sequence: Synthetic peptide
SESDLVNQI

SEQ ID NO: 22042 - protein, 9 aa, Artificial Sequence
  Description of Artificial Sequence: Synthetic peptide
SESAIRKAL

SEQ ID NO: 22043 - protein, 10 aa, Artificial Sequence
  Description of Artificial Sequence: Synthetic peptide
TEPIVGAETF

SEQ ID NO: 22044 - protein, 10 aa, Artificial Sequence
  Description of Artificial Sequence: Synthetic peptide
NERSGTGSSF

SEQ ID NO: 22045 - protein, 11 aa, Artificial Sequence
  Description of Artificial Sequence: Synthetic peptide
AELELAENREI

SEQ ID NO: 22046 - protein, 9 aa, Artificial Sequence
  Description of Artificial Sequence: Synthetic peptide
YESNPYPNL

SEQ ID NO: 22047 - protein, 10 aa, Artificial Sequence
  Description of Artificial Sequence: Synthetic peptide
AEHLKTAVQM

SEQ ID NO: 22048 - protein, 9 aa, Artificial Sequence
  Description of Artificial Sequence: Synthetic peptide
TEMEKEGKI

SEQ ID NO: 22049 - protein, 9 aa, Artificial Sequence
  Description of Artificial Sequence: Synthetic peptide
SESELVNQI

SEQ ID NO: 22050 - protein, 10 aa, Artificial Sequence
  Description of Artificial Sequence: Synthetic peptide
QELKNSAISL

SEQ ID NO: 22051 - protein, 10 aa, Artificial Sequence
  Description of Artificial Sequence: Synthetic peptide
AEGTDRIIEI

SEQ ID NO: 22052 - protein, 9 aa, Artificial Sequence
  Description of Artificial Sequence: Synthetic peptide
MEDEHREVL

SEQ ID NO: 22053 - protein, 10 aa, Artificial Sequence
  Description of Artificial Sequence: Synthetic peptide
EEIIIRSENI

SEQ ID NO: 22054 - protein, 9 aa, Artificial Sequence
  Description of Artificial Sequence: Synthetic peptide
SESAVRKAI

SEQ ID NO: 22055 - protein, 9 aa, Artificial Sequence
  Description of Artificial Sequence: Synthetic peptide
SEGATPQDL

SEQ ID NO: 22056 - protein, 11 aa, Artificial Sequence
  Description of Artificial Sequence: Synthetic peptide
AEIQKQGHGQW

SEQ ID NO: 22057 - protein, 10 aa, Artificial Sequence
  Description of Artificial Sequence: Synthetic peptide
KEIGNYSDTI

SEQ ID NO: 22058 - protein, 11 aa, Artificial Sequence
  Description of Artificial Sequence: Synthetic peptide
SELVNQIIEQL

SEQ ID NO: 22059 - protein, 11 aa, Artificial Sequence
  Description of Artificial Sequence: Synthetic peptide
NETGENGTITL

SEQ ID NO: 22060 - protein, 9 aa, Artificial Sequence
  Description of Artificial Sequence: Synthetic peptide
QEKNEQDLL

SEQ ID NO: 22061 - protein, 8 aa, Artificial Sequence
  Description of Artificial Sequence: Synthetic peptide
AELQAICL

SEQ ID NO: 22062 - protein, 11 aa, Artificial Sequence
  Description of Artificial Sequence: Synthetic peptide
SEQQLLTPVRI

SEQ ID NO: 22063 - protein, 10 aa, Artificial Sequence
  Description of Artificial Sequence: Synthetic peptide
EEIIIRSEDI

SEQ ID NO: 22064 - protein, 9 aa, Artificial Sequence
  Description of Artificial Sequence: Synthetic peptide
AELVVTTYW

SEQ ID NO: 22065 - protein, 11 aa, Artificial Sequence
  Description of Artificial Sequence: Synthetic peptide
QELKNSAISLL

SEQ ID NO: 22066 - protein, 10 aa, Artificial Sequence
  Description of Artificial Sequence: Synthetic peptide
IEAQQQMLQL

SEQ ID NO: 22067 - protein, 10 aa, Artificial Sequence
  Description of Artificial Sequence: Synthetic peptide
TEGGLGSPQI

SEQ ID NO: 22068 - protein, 9 aa, Artificial Sequence
  Description of Artificial Sequence: Synthetic peptide
ISNHTSTIY

SEQ ID NO: 22069 - protein, 10 aa, Artificial Sequence
  Description of Artificial Sequence: Synthetic peptide
ILKEPVHGVY

SEQ ID NO: 22070 - protein, 9 aa, Artificial Sequence
  Description of Artificial Sequence: Synthetic peptide
GQKAIGTVL

SEQ ID NO: 22071 - protein, 8 aa, Artificial Sequence
  Description of Artificial Sequence: Synthetic peptide
GQMVHQAL

SEQ ID NO: 22072 - protein, 9 aa, Artificial Sequence
  Description of Artificial Sequence: Synthetic peptide
SQVTNPVVM

SEQ ID NO: 22073 - protein, 9 aa, Artificial Sequence
  Description of Artificial Sequence: Synthetic peptide
KALGPGASL

SEQ ID NO: 22074 - protein, 8 aa, Artificial Sequence
  Description of Artificial Sequence: Synthetic peptide
HQAAMQML

SEQ ID NO: 22075 - protein, 9 aa, Artificial Sequence
  Description of Artificial Sequence: Synthetic peptide
IKPVVSTQL

SEQ ID NO: 22076 - protein, 9 aa, Artificial Sequence
  Description of Artificial Sequence: Synthetic peptide
KALGSGATL

SEQ ID NO: 22077 - protein, 9 aa, Artificial Sequence
  Description of Artificial Sequence: Synthetic peptide
RAIEAQQHL

SEQ ID NO: 22078 - protein, 10 aa, Artificial Sequence
  Description of Artificial Sequence: Synthetic peptide
SLFGNDPLSQ

SEQ ID NO: 22079 - protein, 9 aa, Artificial Sequence
  Description of Artificial Sequence: Synthetic peptide
EQSPPLTSL

SEQ ID NO: 22080 - protein, 11 aa, Artificial Sequence
  Description of Artificial Sequence: Synthetic peptide
GHLILGNIDNL

SEQ ID NO: 22081 - protein, 9 aa, Artificial Sequence
  Description of Artificial Sequence: Synthetic peptide
TQVGSLQYL

SEQ ID NO: 22082 - protein, 8 aa, Artificial Sequence
  Description of Artificial Sequence: Synthetic peptide
YETEVHNV

SEQ ID NO: 22083 - protein, 9 aa, Artificial Sequence
  Description of Artificial Sequence: Synthetic peptide
SESDLVNQI

SEQ ID NO: 22084 - protein, 9 aa, Artificial Sequence
  Description of Artificial Sequence: Synthetic peptide
SESELVNQI

SEQ ID NO: 22085 - protein, 10 aa, Artificial Sequence
  Description of Artificial Sequence: Synthetic peptide
CEYQAGHTQV

SEQ ID NO: 22086 - protein, 10 aa, Artificial Sequence
  Description of Artificial Sequence: Synthetic peptide
KEISNHTSTI

SEQ ID NO: 22087 - protein, 9 aa, Artificial Sequence
  Description of Artificial Sequence: Synthetic peptide
YESNPYPNL

SEQ ID NO: 22088 - protein, 9 aa, Artificial Sequence
  Description of Artificial Sequence: Synthetic peptide
TEMEKEGKI

SEQ ID NO: 22089 - protein, 10 aa, Artificial Sequence
  Description of Artificial Sequence: Synthetic peptide
TEPSFNFPQI

SEQ ID NO: 22090 - protein, 10 aa, Artificial Sequence
  Description of Artificial Sequence: Synthetic peptide
KEIGNYSDTI

SEQ ID NO: 22091 - protein, 10 aa, Artificial Sequence
  Description of Artificial Sequence: Synthetic peptide
EEIKSLYNTI

SEQ ID NO: 22092 - protein, 9 aa, Artificial Sequence
  Description of Artificial Sequence: Synthetic peptide
VEQMHTDII

SEQ ID NO: 22093 - protein, 8 aa, Artificial Sequence
  Description of Artificial Sequence: Synthetic peptide
EEDTTITI

SEQ ID NO: 22094 - protein, 10 aa, Artificial Sequence
  Description of Artificial Sequence: Synthetic peptide
QEQGPPLTSL

SEQ ID NO: 22095 - protein, 8 aa, Artificial Sequence
  Description of Artificial Sequence: Synthetic peptide
GELGSPQI

SEQ ID NO: 22096 - protein, 8 aa, Artificial Sequence
  Description of Artificial Sequence: Synthetic peptide
GEAIHGQV

SEQ ID NO: 22097 - protein, 10 aa, Artificial Sequence
  Description of Artificial Sequence: Synthetic peptide
AESFGFGEKI

SEQ ID NO: 22098 - protein, 9 aa, Artificial Sequence
  Description of Artificial Sequence: Synthetic peptide
EEEDTTITI

SEQ ID NO: 22099 - protein, 11 aa, Artificial Sequence
  Description of Artificial Sequence: Synthetic peptide
SEELRSLFNTV

SEQ ID NO: 22100 - protein, 11 aa, Artificial Sequence
  Description of Artificial Sequence: Synthetic peptide
AELELAENREI

SEQ ID NO: 22101 - protein, 8 aa, Artificial Sequence
  Description of Artificial Sequence: Synthetic peptide
QEIKNSAI

SEQ ID NO: 22102 - protein, 9 aa, Artificial Sequence
  Description of Artificial Sequence: Synthetic peptide
IEICGQKAI

SEQ ID NO: 22103 - protein, 10 aa, Artificial Sequence
  Description of Artificial Sequence: Synthetic peptide
EELRSLFNTV

SEQ ID NO: 22104 - protein, 9 aa, Artificial Sequence
  Description of Artificial Sequence: Synthetic peptide
YETEVHNVW

SEQ ID NO: 22105 - protein, 8 aa, Artificial Sequence
  Description of Artificial Sequence: Synthetic peptide
YEKEVHNV

SEQ ID NO: 22106 - protein, 9 aa, Artificial Sequence
  Description of Artificial Sequence: Synthetic peptide
AEWDRMHPV

SEQ ID NO: 22107 - protein, 10 aa, Artificial Sequence
  Description of Artificial Sequence: Synthetic peptide
SESDLVNQII

SEQ ID NO: 22108 - protein, 10 aa, Artificial Sequence
  Description of Artificial Sequence: Synthetic peptide
AESFGFGEEI

SEQ ID NO: 22109 - protein, 9 aa, Artificial Sequence
  Description of Artificial Sequence: Synthetic peptide
MEICGQKAI

SEQ ID NO: 22110 - protein, 9 aa, Artificial Sequence
  Description of Artificial Sequence: Synthetic peptide
IEVKDTKEA

SEQ ID NO: 22111 - protein, 9 aa, Artificial Sequence
  Description of Artificial Sequence: Synthetic peptide
LETEPIVGA

SEQ ID NO: 22112 - protein, 11 aa, Artificial Sequence
  Description of Artificial Sequence: Synthetic peptide
AEAMSQVTNSA

SEQ ID NO: 22113 - protein, 9 aa, Artificial Sequence
  Description of Artificial Sequence: Synthetic peptide
AETFYVDGA

SEQ ID NO: 22114 - protein, 10 aa, Artificial Sequence
  Description of Artificial Sequence: Synthetic peptide
REFSSEQTRA

SEQ ID NO: 22115 - protein, 9 aa, Artificial Sequence
  Description of Artificial Sequence: Synthetic peptide
LILGDINNL

SEQ ID NO: 22116 - protein, 9 aa, Artificial Sequence
  Description of Artificial Sequence: Synthetic peptide
ASITLTVQA

SEQ ID NO: 22117 - protein, 9 aa, Artificial Sequence
  Description of Artificial Sequence: Synthetic peptide
TETLLVQNA

SEQ ID NO: 22118 - protein, 9 aa, Artificial Sequence
  Description of Artificial Sequence: Synthetic peptide
LILGNIDNL

SEQ ID NO: 22119 - protein, 10 aa, Artificial Sequence
  Description of Artificial Sequence: Synthetic peptide
AETFYVDGAA

SEQ ID NO: 22120 - protein, 9 aa, Artificial Sequence
  Description of Artificial Sequence: Synthetic peptide
ATLEEMMTA

SEQ ID NO: 22121 - protein, 8 aa, Artificial Sequence
  Description of Artificial Sequence: Synthetic peptide
TEVVQKVA

SEQ ID NO: 22122 - protein, 9 aa, Artificial Sequence
  Description of Artificial Sequence: Synthetic peptide
TQVGSLQYL

SEQ ID NO: 22123 - protein, 9 aa, Artificial Sequence
  Description of Artificial Sequence: Synthetic peptide
GENGTITLP

SEQ ID NO: 22124 - protein, 11 aa, Artificial Sequence
  Description of Artificial Sequence: Synthetic peptide
TQVEPDLADQL

SEQ ID NO: 22125 - protein, 10 aa, Artificial Sequence
  Description of Artificial Sequence: Synthetic peptide
REQAEHLKTA

SEQ ID NO: 22126 - protein, 9 aa, Artificial Sequence
  Description of Artificial Sequence: Synthetic peptide
QLTEVVQKV

SEQ ID NO: 22127 - protein, 9 aa, Artificial Sequence
  Description of Artificial Sequence: Synthetic peptide
EEVGFPVRP

SEQ ID NO: 22128 - protein, 9 aa, Artificial Sequence
  Description of Artificial Sequence: Synthetic peptide
ALFLGFLGA

SEQ ID NO: 22129 - protein, 11 aa, Artificial Sequence
  Description of Artificial Sequence: Synthetic peptide
REVLASQQREA

SEQ ID NO: 22130 - protein, 8 aa, Artificial Sequence
  Description of Artificial Sequence: Synthetic peptide
TAFTIPSI

SEQ ID NO: 22131 - protein, 9 aa, Artificial Sequence
  Description of Artificial Sequence: Synthetic peptide
FPISPIETV

SEQ ID NO: 22132 - protein, 9 aa, Artificial Sequence
  Description of Artificial Sequence: Synthetic peptide
DAKAYETEV

SEQ ID NO: 22133 - protein, 8 aa, Artificial Sequence
  Description of Artificial Sequence: Synthetic peptide
VPLTVGII

SEQ ID NO: 22134 - protein, 8 aa, Artificial Sequence
  Description of Artificial Sequence: Synthetic peptide
IAFAVLSV

SEQ ID NO: 22135 - protein, 10 aa, Artificial Sequence
  Description of Artificial Sequence: Synthetic peptide
IPYNPQSQGV

SEQ ID NO: 22136 - protein, 9 aa, Artificial Sequence
  Description of Artificial Sequence: Synthetic peptide
YAPPIAGSI

SEQ ID NO: 22137 - protein, 8 aa, Artificial Sequence
  Description of Artificial Sequence: Synthetic peptide
VPVDPREV

SEQ ID NO: 22138 - protein, 8 aa, Artificial Sequence
  Description of Artificial Sequence: Synthetic peptide
TPVRIIKI

SEQ ID NO: 22139 - protein, 8 aa, Artificial Sequence
  Description of Artificial Sequence: Synthetic peptide
VALVVALI

SEQ ID NO: 22140 - protein, 9 aa, Artificial Sequence
  Description of Artificial Sequence: Synthetic peptide
LPPVVAKEI

SEQ ID NO: 22141 - protein, 9 aa, Artificial Sequence
  Description of Artificial Sequence: Synthetic peptide
SPLSFQTLI

SEQ ID NO: 22142 - protein, 9 aa, Artificial Sequence
  Description of Artificial Sequence: Synthetic peptide
LPPIVAKEI

SEQ ID NO: 22143 - protein, 8 aa, Artificial Sequence
  Description of Artificial Sequence: Synthetic peptide
DSWTVNDI

SEQ ID NO: 22144 - protein, 9 aa, Artificial Sequence
  Description of Artificial Sequence: Synthetic peptide
DAKAYEKEV

SEQ ID NO: 22145 - protein, 8 aa, Artificial Sequence
  Description of Artificial Sequence: Synthetic peptide
NPYNTPVF

SEQ ID NO: 22146 - protein, 8 aa, Artificial Sequence
  Description of Artificial Sequence: Synthetic peptide
DPQVTRHI

SEQ ID NO: 22147 - protein, 8 aa, Artificial Sequence
  Description of Artificial Sequence: Synthetic peptide
VAALILAI

SEQ ID NO: 22148 - protein, 9 aa, Artificial Sequence
  Description of Artificial Sequence: Synthetic peptide
NPPVPVGEI

SEQ ID NO: 22149 - protein, 9 aa, Artificial Sequence
  Description of Artificial Sequence: Synthetic peptide
YAPPTAGNI

SEQ ID NO: 22150 - protein, 9 aa, Artificial Sequence
  Description of Artificial Sequence: Synthetic peptide
RPKPPVPSV

SEQ ID NO: 22151 - protein, 8 aa, Artificial Sequence
  Description of Artificial Sequence: Synthetic peptide
TAYFILKL

SEQ ID NO: 22152 - protein, 8 aa, Artificial Sequence
  Description of Artificial Sequence: Synthetic peptide
APPIAGSI

SEQ ID NO: 22153 - protein, 9 aa, Artificial Sequence
  Description of Artificial Sequence: Synthetic peptide
NPPIPVGEI

SEQ ID NO: 22154 - protein, 8 aa, Artificial Sequence
  Description of Artificial Sequence: Synthetic peptide
IATEGIVI

SEQ ID NO: 22155 - protein, 9 aa, Artificial Sequence
  Description of Artificial Sequence: Synthetic peptide
IAFAVLSVV

SEQ ID NO: 22156 - protein, 8 aa, Artificial Sequence
  Description of Artificial Sequence: Synthetic peptide
VPVDPAEV

SEQ ID NO: 22157 - protein, 11 aa, Artificial Sequence
  Description of Artificial Sequence: Synthetic peptide
IPYNPQSQGVV

SEQ ID NO: 22158 - protein, 8 aa, Artificial Sequence
  Description of Artificial Sequence: Synthetic peptide
SPVSILDI

SEQ ID NO: 22159 - protein, 9 aa, Artificial Sequence
  Description of Artificial Sequence: Synthetic peptide
FPISPIETV

SEQ ID NO: 22160 - protein, 9 aa, Artificial Sequence
  Description of Artificial Sequence: Synthetic peptide
VPLTVGIIA

SEQ ID NO: 22161 - protein, 9 aa, Artificial Sequence
  Description of Artificial Sequence: Synthetic peptide
IPKQPLPQA

SEQ ID NO: 22162 - protein, 9 aa, Artificial Sequence
  Description of Artificial Sequence: Synthetic peptide
EPIPIHYCA

SEQ ID NO: 22163 - protein, 9 aa, Artificial Sequence
  Description of Artificial Sequence: Synthetic peptide
HVASGYIEA

SEQ ID NO: 22164 - protein, 9 aa, Artificial Sequence
  Description of Artificial Sequence: Synthetic peptide
RPKPPVPSV

SEQ ID NO: 22165 - protein, 9 aa, Artificial Sequence
  Description of Artificial Sequence: Synthetic peptide
QAIYAPPTA

SEQ ID NO: 22166 - protein, 10 aa, Artificial Sequence
  Description of Artificial Sequence: Synthetic peptide
EPLGIAPTRA

SEQ ID NO: 22167 - protein, 9 aa, Artificial Sequence
  Description of Artificial Sequence: Synthetic peptide
EATPTLFCA

SEQ ID NO: 22168 - protein, 10 aa, Artificial Sequence
  Description of Artificial Sequence: Synthetic peptide
YPKPEGTRQA

SEQ ID NO: 22169 - protein, 9 aa, Artificial Sequence
  Description of Artificial Sequence: Synthetic peptide
NPYNTPVFA

SEQ ID NO: 22170 - protein, 11 aa, Artificial Sequence
  Description of Artificial Sequence: Synthetic peptide
VPVDPREVEEA

SEQ ID NO: 22171 - protein, 8 aa, Artificial Sequence
  Description of Artificial Sequence: Synthetic peptide
TAFTIPSI

SEQ ID NO: 22172 - protein, 11 aa, Artificial Sequence
  Description of Artificial Sequence: Synthetic peptide
LPPVVAKEIVA

SEQ ID NO: 22173 - protein, 11 aa, Artificial Sequence
  Description of Artificial Sequence: Synthetic peptide
FPISPIETVPV

SEQ ID NO: 22174 - protein, 11 aa, Artificial Sequence
  Description of Artificial Sequence: Synthetic peptide
MLNTVGGHQAA

SEQ ID NO: 22175 - protein, 10 aa, Artificial Sequence
  Description of Artificial Sequence: Synthetic peptide
EAMSQVTNSA

SEQ ID NO: 22176 - protein, 9 aa, Artificial Sequence
  Description of Artificial Sequence: Synthetic peptide
EATTTLFCA

SEQ ID NO: 22177 - protein, 9 aa, Artificial Sequence
  Description of Artificial Sequence: Synthetic peptide
HPVHAGPIP

SEQ ID NO: 22178 - protein, 10 aa, Artificial Sequence
  Description of Artificial Sequence: Synthetic peptide
HPVHAGPIPP

SEQ ID NO: 22179 - protein, 9 aa, Artificial Sequence
  Description of Artificial Sequence: Synthetic peptide
RPKPPVPSV

SEQ ID NO: 22180 - protein, 9 aa, Artificial Sequence
  Description of Artificial Sequence: Synthetic peptide
IPKQPLPQA

SEQ ID NO: 22181 - protein, 10 aa, Artificial Sequence
  Description of Artificial Sequence: Synthetic peptide
YPKPEGTRQA

SEQ ID NO: 22182 - protein, 9 aa, Artificial Sequence
  Description of Artificial Sequence: Synthetic peptide
FPISPIETV

SEQ ID NO: 22183 - protein, 9 aa, Artificial Sequence
  Description of Artificial Sequence: Synthetic peptide
RPEPTAPPA

SEQ ID NO: 22184 - protein, 9 aa, Artificial Sequence
  Description of Artificial Sequence: Synthetic peptide
VPLTVGIIA

SEQ ID NO: 22185 - protein, 9 aa, Artificial Sequence
  Description of Artificial Sequence: Synthetic peptide
IPKQPLPQA

SEQ ID NO: 22186 - protein, 9 aa, Artificial Sequence
  Description of Artificial Sequence: Synthetic peptide
RPKPPVPSV

SEQ ID NO: 22187 - protein, 9 aa, Artificial Sequence
  Description of Artificial Sequence: Synthetic peptide
FPISPIETV

SEQ ID NO: 22188 - protein, 9 aa, Artificial Sequence
  Description of Artificial Sequence: Synthetic peptide
VPLTVGIIA

SEQ ID NO: 22189 - protein, 10 aa, Artificial Sequence
  Description of Artificial Sequence: Synthetic peptide
RPVVTVKVGG

SEQ ID NO: 22190 - protein, 10 aa, Artificial Sequence
  Description of Artificial Sequence: Synthetic peptide
IPAETGQETA

SEQ ID NO: 22191 - protein, 9 aa, Artificial Sequence
  Description of Artificial Sequence: Synthetic peptide
NPYNTPVFA

SEQ ID NO: 22192 - protein, 9 aa, Artificial Sequence
  Description of Artificial Sequence: Synthetic peptide
RPEPTAPPA

SEQ ID NO: 22193 - protein, 10 aa, Artificial Sequence
  Description of Artificial Sequence: Synthetic peptide
YPKPEGTRQA

SEQ ID NO: 22194 - protein, 10 aa, Artificial Sequence
  Description of Artificial Sequence: Synthetic peptide
IPYNPQSQGV

SEQ ID NO: 22195 - protein, 9 aa, Artificial Sequence
  Description of Artificial Sequence: Synthetic peptide
RPKPPVPSV

SEQ ID NO: 22196 - protein, 9 aa, Artificial Sequence
  Description of Artificial Sequence: Synthetic peptide
IPKQPLPQA

SEQ ID NO: 22197 - protein, 9 aa, Artificial Sequence
  Description of Artificial Sequence: Synthetic peptide
FPISPIETV

SEQ ID NO: 22198 - protein, 10 aa, Artificial Sequence
  Description of Artificial Sequence: Synthetic peptide
RPVVTVKVGG

SEQ ID NO: 22199 - protein, 9 aa, Artificial Sequence
  Description of Artificial Sequence: Synthetic peptide
VPLTVGIIA

SEQ ID NO: 22200 - protein, 10 aa, Artificial Sequence
  Description of Artificial Sequence: Synthetic peptide
IPYNPQSQGV

SEQ ID NO: 22201 - protein, 10 aa, Artificial Sequence
  Description of Artificial Sequence: Synthetic peptide
APAGFAILKC

SEQ ID NO: 22202 - protein, 11 aa, Artificial Sequence
  Description of Artificial Sequence: Synthetic peptide
VPVDPREVEEA

SEQ ID NO: 22203 - protein, 10 aa, Artificial Sequence
  Description of Artificial Sequence: Synthetic peptide
IPAETGQETA

SEQ ID NO: 22204 - protein, 10 aa, Artificial Sequence
  Description of Artificial Sequence: Synthetic peptide
YPKPEGTRQA

SEQ ID NO: 22205 - protein, 9 aa, Artificial Sequence
  Description of Artificial Sequence: Synthetic peptide
RPEPTAPPA

SEQ ID NO: 22206 - protein, 10 aa, Artificial Sequence
  Description of Artificial Sequence: Synthetic peptide
SPEVIPMFSA

SEQ ID NO: 22207 - protein, 9 aa, Artificial Sequence
  Description of Artificial Sequence: Synthetic peptide
QAIYAPPTA

SEQ ID NO: 22208 - protein, 9 aa, Artificial Sequence
  Description of Artificial Sequence: Synthetic peptide
NPYPKPEGT

SEQ ID NO: 22209 - protein, 9 aa, Artificial Sequence
  Description of Artificial Sequence: Synthetic peptide
RPAADRVGT

SEQ ID NO: 22210 - protein, 11 aa, Artificial Sequence
  Description of Artificial Sequence: Synthetic peptide
KAYETEVHNVW

SEQ ID NO: 22211 - protein, 9 aa, Artificial Sequence
  Description of Artificial Sequence: Synthetic peptide
STLQEQITW

SEQ ID NO: 22212 - protein, 9 aa, Artificial Sequence
  Description of Artificial Sequence: Synthetic peptide
RAREIQRNW

SEQ ID NO: 22213 - protein, 11 aa, Artificial Sequence
  Description of Artificial Sequence: Synthetic peptide
KAYEKEVHNVW

SEQ ID NO: 22214 - protein, 11 aa, Artificial Sequence
  Description of Artificial Sequence: Synthetic peptide
RANSPTSRELW

SEQ ID NO: 22215 - protein, 10 aa, Artificial Sequence
  Description of Artificial Sequence: Synthetic peptide
TTNVPWNSSW

SEQ ID NO: 22216 - protein, 10 aa, Artificial Sequence
  Description of Artificial Sequence: Synthetic peptide
KIATEGIVIW

SEQ ID NO: 22217 - protein, 9 aa, Artificial Sequence
  Description of Artificial Sequence: Synthetic peptide
RIKQIINMW

SEQ ID NO: 22218 - protein, 11 aa, Artificial Sequence
  Description of Artificial Sequence: Synthetic peptide
TTSTLQEQITW

SEQ ID NO: 22219 - protein, 9 aa, Artificial Sequence
  Description of Artificial Sequence: Synthetic peptide
STLQEQIAW

SEQ ID NO: 22220 - protein, 11 aa, Artificial Sequence
  Description of Artificial Sequence: Synthetic peptide
LAFPQGEAREF

SEQ ID NO: 22221 - protein, 10 aa, Artificial Sequence
  Description of Artificial Sequence: Synthetic peptide
VTVYYGVPVW

SEQ ID NO: 22222 - protein, 9 aa, Artificial Sequence
  Description of Artificial Sequence: Synthetic peptide
KTKPPVPSV

SEQ ID NO: 22223 - protein, 11 aa, Artificial Sequence
  Description of Artificial Sequence: Synthetic peptide
SSFNFPQITLW

SEQ ID NO: 22224 - protein, 10 aa, Artificial Sequence
  Description of Artificial Sequence: Synthetic peptide
GSWEALKYLW

SEQ ID NO: 22225 - protein, 11 aa, Artificial Sequence
  Description of Artificial Sequence: Synthetic peptide
SVLSGGKLDAW

SEQ ID NO: 22226 - protein, 9 aa, Artificial Sequence
  Description of Artificial Sequence: Synthetic peptide
KTAVQMAVF

SEQ ID NO: 22227 - protein, 11 aa, Artificial Sequence
  Description of Artificial Sequence: Synthetic peptide
KSLYNTIAVLY

SEQ ID NO: 22228 - protein, 8 aa, Artificial Sequence
  Description of Artificial Sequence: Synthetic peptide
ISKKANRW

SEQ ID NO: 22229 - protein, 11 aa, Artificial Sequence
  Description of Artificial Sequence: Synthetic peptide
KSIHIGPGRAF

SEQ ID NO: 22230 - protein, 9 aa, Artificial Sequence
  Description of Artificial Sequence: Synthetic peptide
WSKSSIVGW

SEQ ID NO: 22231 - protein, 9 aa, Artificial Sequence
  Description of Artificial Sequence: Synthetic peptide
RAVGIGALF

SEQ ID NO: 22232 - protein, 9 aa, Artificial Sequence
  Description of Artificial Sequence: Synthetic peptide
HTSTIYRLI

SEQ ID NO: 22233 - protein, 9 aa, Artificial Sequence
  Description of Artificial Sequence: Synthetic peptide
RVRGMQRNW

SEQ ID NO: 22234 - protein, 9 aa, Artificial Sequence
  Description of Artificial Sequence: Synthetic peptide
RSVRLVSGF

SEQ ID NO: 22235 - protein, 9 aa, Artificial Sequence
  Description of Artificial Sequence: Synthetic peptide
STLQEQITW

SEQ ID NO: 22236 - protein, 9 aa, Artificial Sequence
  Description of Artificial Sequence: Synthetic peptide
RAIEAQQQM

SEQ ID NO: 22237 - protein, 9 aa, Artificial Sequence
  Description of Artificial Sequence: Synthetic peptide
RAIEAQQHL

SEQ ID NO: 22238 - protein, 9 aa, Artificial Sequence
  Description of Artificial Sequence: Synthetic peptide
STLQEQIAW

SEQ ID NO: 22239 - protein, 10 aa, Artificial Sequence
  Description of Artificial Sequence: Synthetic peptide
AADKGVSQNY

SEQ ID NO: 22240 - protein, 9 aa, Artificial Sequence
  Description of Artificial Sequence: Synthetic peptide
KVVSITETT

SEQ ID NO: 22241 - protein, 9 aa, Artificial Sequence
  Description of Artificial Sequence: Synthetic peptide
IITQIQPSI

SEQ ID NO: 22242 - protein, 9 aa, Artificial Sequence
  Description of Artificial Sequence: Synthetic peptide
GSEEIKSLY

SEQ ID NO: 22243 - protein, 9 aa, Artificial Sequence
  Description of Artificial Sequence: Synthetic peptide
RAVGIGALF

SEQ ID NO: 22244 - protein, 9 aa, Artificial Sequence
  Description of Artificial Sequence: Synthetic peptide
KVISITETT

SEQ ID NO: 22245 - protein, 9 aa, Artificial Sequence
  Description of Artificial Sequence: Synthetic peptide
KTAVQMAVF

SEQ ID NO: 22246 - protein, 10 aa, Artificial Sequence
  Description of Artificial Sequence: Synthetic peptide
KADKGVSQNY

SEQ ID NO: 22247 - protein, 10 aa, Artificial Sequence
  Description of Artificial Sequence: Synthetic peptide
RAIEAQQHLL

SEQ ID NO: 22248 - protein, 11 aa, Artificial Sequence
  Description of Artificial Sequence: Synthetic peptide
KAYETEVHNVW

SEQ ID NO: 22249 - protein, 9 aa, Artificial Sequence
  Description of Artificial Sequence: Synthetic peptide
RAVGLGAVF

SEQ ID NO: 22250 - protein, 8 aa, Artificial Sequence
  Description of Artificial Sequence: Synthetic peptide
GQGVSIEW

SEQ ID NO: 22251 - protein, 9 aa, Artificial Sequence
  Description of Artificial Sequence: Synthetic peptide
TINEEAAEW

SEQ ID NO: 22252 - protein, 9 aa, Artificial Sequence
  Description of Artificial Sequence: Synthetic peptide
KTKPPVPSV

SEQ ID NO: 22253 - protein, 8 aa, Artificial Sequence
  Description of Artificial Sequence: Synthetic peptide
NSPTSREL

SEQ ID NO: 22254 - protein, 9 aa, Artificial Sequence
  Description of Artificial Sequence: Synthetic peptide
YSPLSFQTL

SEQ ID NO: 22255 - protein, 9 aa, Artificial Sequence
  Description of Artificial Sequence: Synthetic peptide
YSPVSILDI

SEQ ID NO: 22256 - protein, 9 aa, Artificial Sequence
  Description of Artificial Sequence: Synthetic peptide
HTQVGSLQY

SEQ ID NO: 22257 - protein, 9 aa, Artificial Sequence
  Description of Artificial Sequence: Synthetic peptide
TEVVQKVAM

SEQ ID NO: 22258 - protein, 8 aa, Artificial Sequence
  Description of Artificial Sequence: Synthetic peptide
AELVVTTY

SEQ ID NO: 22259 - protein, 10 aa, Artificial Sequence
  Description of Artificial Sequence: Synthetic peptide
AADKGVSQNY

SEQ ID NO: 22260 - protein, 9 aa, Artificial Sequence
  Description of Artificial Sequence: Synthetic peptide
DAELVVTTY

SEQ ID NO: 22261 - protein, 9 aa, Artificial Sequence
  Description of Artificial Sequence: Synthetic peptide
GSEEIKSLY

SEQ ID NO: 22262 - protein, 8 aa, Artificial Sequence
  Description of Artificial Sequence: Synthetic peptide
VLDVGDAY

SEQ ID NO: 22263 - protein, 9 aa, Artificial Sequence
  Description of Artificial Sequence: Synthetic peptide
KALGPGASL

SEQ ID NO: 22264 - protein, 9 aa, Artificial Sequence
  Description of Artificial Sequence: Synthetic peptide
RAIEAQQHL

SEQ ID NO: 22265 - protein, 9 aa, Artificial Sequence
  Description of Artificial Sequence: Synthetic peptide
LALDKWASL

SEQ ID NO: 22266 - protein, 9 aa, Artificial Sequence
  Description of Artificial Sequence: Synthetic peptide
KALGSGATL

SEQ ID NO: 22267 - protein, 9 aa, Artificial Sequence
  Description of Artificial Sequence: Synthetic peptide
KALGPGASL

SEQ ID NO: 22268 - protein, 9 aa, Artificial Sequence
  Description of Artificial Sequence: Synthetic peptide
RAIEAQQHL

SEQ ID NO: 22269 - protein, 9 aa, Artificial Sequence
  Description of Artificial Sequence: Synthetic peptide
KALGSGATL

SEQ ID NO: 22270 - protein, 9 aa, Artificial Sequence
  Description of Artificial Sequence: Synthetic peptide
ATDIQTKEL

SEQ ID NO: 22271 - protein, 9 aa, Artificial Sequence
  Description of Artificial Sequence: Synthetic peptide
YVDRFFKTL

SEQ ID NO: 22272 - protein, 9 aa, Artificial Sequence
  Description of Artificial Sequence: Synthetic peptide
SAEPVPLQL

SEQ ID NO: 22273 - protein, 8 aa, Artificial Sequence
  Description of Artificial Sequence: Synthetic peptide
HTDNGTNF

SEQ ID NO: 22274 - protein, 9 aa, Artificial Sequence
  Description of Artificial Sequence: Synthetic peptide
QYDQVLIEI

SEQ ID NO: 22275 - protein, 8 aa, Artificial Sequence
  Description of Artificial Sequence: Synthetic peptide
HTDNGTNF

SEQ ID NO: 22276 - protein, 8 aa, Artificial Sequence
  Description of Artificial Sequence: Synthetic peptide
HTDNGSNF

SEQ ID NO: 22277 - protein, 9 aa, Artificial Sequence
  Description of Artificial Sequence: Synthetic peptide
SAEPVPLQL

SEQ ID NO: 22278 - protein, 9 aa, Artificial Sequence
  Description of Artificial Sequence: Synthetic peptide
IQDNSEIKV

SEQ ID NO: 22279 - protein, 8 aa, Artificial Sequence
  Description of Artificial Sequence: Synthetic peptide
YSDTIYKL

SEQ ID NO: 22280 - protein, 9 aa, Artificial Sequence
  Description of Artificial Sequence: Synthetic peptide
VLDVGDAYF

SEQ ID NO: 22281 - protein, 9 aa, Artificial Sequence
  Description of Artificial Sequence: Synthetic peptide
NADKLWVTV

SEQ ID NO: 22282 - protein, 9 aa, Artificial Sequence
  Description of Artificial Sequence: Synthetic peptide
QRPVVTVKV

SEQ ID NO: 22283 - protein, 9 aa, Artificial Sequence
  Description of Artificial Sequence: Synthetic peptide
IRSAHTNDV

SEQ ID NO: 22284 - protein, 9 aa, Artificial Sequence
  Description of Artificial Sequence: Synthetic peptide
LILGDINNL

SEQ ID NO: 22285 - protein, 9 aa, Artificial Sequence
  Description of Artificial Sequence: Synthetic peptide
SAEPVPLQL

SEQ ID NO: 22286 - protein, 9 aa, Artificial Sequence
  Description of Artificial Sequence: Synthetic peptide
FLGAAGSTM

SEQ ID NO: 22287 - protein, 9 aa, Artificial Sequence
  Description of Artificial Sequence: Synthetic peptide
TVLDVGDAY

SEQ ID NO: 22288 - protein, 9 aa, Artificial Sequence
  Description of Artificial Sequence: Synthetic peptide
LILGNIDNL

SEQ ID NO: 22289 - protein, 9 aa, Artificial Sequence
  Description of Artificial Sequence: Synthetic peptide
AVTSSNTAF

SEQ ID NO: 22290 - protein, 9 aa, Artificial Sequence
  Description of Artificial Sequence: Synthetic peptide
IVTDSQYAL

SEQ ID NO: 22291 - protein, 9 aa, Artificial Sequence
  Description of Artificial Sequence: Synthetic peptide
KALGPGASL

SEQ ID NO: 22292 - protein, 9 aa, Artificial Sequence
  Description of Artificial Sequence: Synthetic peptide
SQVTNPVVM

SEQ ID NO: 22293 - protein, 9 aa, Artificial Sequence
  Description of Artificial Sequence: Synthetic peptide
SQVTNSAVM

SEQ ID NO: 22294 - protein, 9 aa, Artificial Sequence
  Description of Artificial Sequence: Synthetic peptide
ALVEICTEM

SEQ ID NO: 22295 - protein, 9 aa, Artificial Sequence
  Description of Artificial Sequence: Synthetic peptide
EQSPPLTSL

SEQ ID NO: 22296 - protein, 9 aa, Artificial Sequence
  Description of Artificial Sequence: Synthetic peptide
ATDIQTKEL

SEQ ID NO: 22297 - protein, 9 aa, Artificial Sequence
  Description of Artificial Sequence: Synthetic peptide
TQDFWEVQL

SEQ ID NO: 22298 - protein, 8 aa, Artificial Sequence
  Description of Artificial Sequence: Synthetic peptide
HTDNGTNF

SEQ ID NO: 22299 - protein, 9 aa, Artificial Sequence
  Description of Artificial Sequence: Synthetic peptide
SAEPVPLQL

SEQ ID NO: 22300 - protein, 8 aa, Artificial Sequence
  Description of Artificial Sequence: Synthetic peptide
YSDTIYKL

SEQ ID NO: 22301 - protein, 8 aa, Artificial Sequence
  Description of Artificial Sequence: Synthetic peptide
GQMVHQAL

SEQ ID NO: 22302 - protein, 9 aa, Artificial Sequence
  Description of Artificial Sequence: Synthetic peptide
GQKAIGTVL

SEQ ID NO: 22303 - protein, 10 aa, Artificial Sequence
  Description of Artificial Sequence: Synthetic peptide
SLFGSDPLSQ

SEQ ID NO: 22304 - protein, 9 aa, Artificial Sequence
  Description of Artificial Sequence: Synthetic peptide
KALGSGATL

SEQ ID NO: 22305 - protein, 10 aa, Artificial Sequence
  Description of Artificial Sequence: Synthetic peptide
VTFEPIPIHY

SEQ ID NO: 22306 - protein, 10 aa, Artificial Sequence
  Description of Artificial Sequence: Synthetic peptide
VSFEPIPIHY

SEQ ID NO: 22307 - protein, 9 aa, Artificial Sequence
  Description of Artificial Sequence: Synthetic peptide
GAASITLTV

SEQ ID NO: 22308 - protein, 9 aa, Artificial Sequence
  Description of Artificial Sequence: Synthetic peptide
SQVTNPVVM

SEQ ID NO: 22309 - protein, 9 aa, Artificial Sequence
  Description of Artificial Sequence: Synthetic peptide
NTKNIIVQL

SEQ ID NO: 22310 - protein, 9 aa, Artificial Sequence
  Description of Artificial Sequence: Synthetic peptide
KTKPPVPSV

SEQ ID NO: 22311 - protein, 8 aa, Artificial Sequence
  Description of Artificial Sequence: Synthetic peptide
SFNITTEL

SEQ ID NO: 22312 - protein, 10 aa, Artificial Sequence
  Description of Artificial Sequence: Synthetic peptide
AFPQGEAREF

SEQ ID NO: 22313 - protein, 9 aa, Artificial Sequence
  Description of Artificial Sequence: Synthetic peptide
IYQEPHKNL

SEQ ID NO: 22314 - protein, 9 aa, Artificial Sequence
  Description of Artificial Sequence: Synthetic peptide
IYQEPYKNL

SEQ ID NO: 22315 - protein, 9 aa, Artificial Sequence
  Description of Artificial Sequence: Synthetic peptide
HFKNGTITF

SEQ ID NO: 22316 - protein, 10 aa, Artificial Sequence
  Description of Artificial Sequence: Synthetic peptide
GFLGAAGSTM

SEQ ID NO: 22317 - protein, 9 aa, Artificial Sequence
  Description of Artificial Sequence: Synthetic peptide
TYQIYQEPY

SEQ ID NO: 22318 - protein, 9 aa, Artificial Sequence
  Description of Artificial Sequence: Synthetic peptide
LFNTVATLY

SEQ ID NO: 22319 - protein, 9 aa, Artificial Sequence
  Description of Artificial Sequence: Synthetic peptide
LYNTIAVLY

SEQ ID NO: 22320 - protein, 8 aa, Artificial Sequence
  Description of Artificial Sequence: Synthetic peptide
NYPIVQNL

SEQ ID NO: 22321 - protein, 8 aa, Artificial Sequence
  Description of Artificial Sequence: Synthetic peptide
SFNITTEL

SEQ ID NO: 22322 - protein, 9 aa, Artificial Sequence
  Description of Artificial Sequence: Synthetic peptide
IYQEPHKNL

SEQ ID NO: 22323 - protein, 9 aa, Artificial Sequence
  Description of Artificial Sequence: Synthetic peptide
IYQEPYKNL

SEQ ID NO: 22324 - protein, 10 aa, Artificial Sequence
  Description of Artificial Sequence: Synthetic peptide
GFLGAAGSTM

SEQ ID NO: 22325 - protein, 10 aa, Artificial Sequence
  Description of Artificial Sequence: Synthetic peptide
AFPQGEAREF

SEQ ID NO: 22326 - protein, 8 aa, Artificial Sequence
  Description of Artificial Sequence: Synthetic peptide
LYNTIAVL

SEQ ID NO: 22327 - protein, 9 aa, Artificial Sequence
  Description of Artificial Sequence: Synthetic peptide
TYQIYQEPY

SEQ ID NO: 22328 - protein, 9 aa, Artificial Sequence
  Description of Artificial Sequence: Synthetic peptide
AISIVALVV

SEQ ID NO: 22329 - protein, 9 aa, Artificial Sequence
  Description of Artificial Sequence: Synthetic peptide
RIVFTVLSV

SEQ ID NO: 22330 - protein, 9 aa, Artificial Sequence
  Description of Artificial Sequence: Synthetic peptide
RSNITGMIL

SEQ ID NO: 22331 - protein, 9 aa, Artificial Sequence
  Description of Artificial Sequence: Synthetic peptide
ANSPTSREL

SEQ ID NO: 22332 - protein, 9 aa, Artificial Sequence
  Description of Artificial Sequence: Synthetic peptide
GAASITLTV

SEQ ID NO: 22333 - protein, 9 aa, Artificial Sequence
  Description of Artificial Sequence: Synthetic peptide
VAREMHPEY

SEQ ID NO: 22334 - protein, 9 aa, Artificial Sequence
  Description of Artificial Sequence: Synthetic peptide
VSSGIRKVL

SEQ ID NO: 22335 - protein, 9 aa, Artificial Sequence
  Description of Artificial Sequence: Synthetic peptide
ANSPTSREL

SEQ ID NO: 22336 - protein, 10 aa, Artificial Sequence
  Description of Artificial Sequence: Synthetic peptide
IATDIQTKEL

SEQ ID NO: 22337 - protein, 9 aa, Artificial Sequence
  Description of Artificial Sequence: Synthetic peptide
VAREMHPEY

SEQ ID NO: 22338 - protein, 9 aa, Artificial Sequence
  Description of Artificial Sequence: Synthetic peptide
RAIEAQQQM

SEQ ID NO: 22339 - protein, 9 aa, Artificial Sequence
  Description of Artificial Sequence: Synthetic peptide
KTKPPVPSV

SEQ ID NO: 22340 - protein, 9 aa, Artificial Sequence
  Description of Artificial Sequence: Synthetic peptide
RAIEAQQHL

SEQ ID NO: 22341 - protein, 9 aa, Artificial Sequence
  Description of Artificial Sequence: Synthetic peptide
GAASITLTV

SEQ ID NO: 22342 - protein, 9 aa, Artificial Sequence
  Description of Artificial Sequence: Synthetic peptide
YETEVHNVW

SEQ ID NO: 22343 - protein, 11 aa, Artificial Sequence
  Description of Artificial Sequence: Synthetic peptide
AEIQKQGNDQW

SEQ ID NO: 22344 - protein, 11 aa, Artificial Sequence
  Description of Artificial Sequence: Synthetic peptide
SEVNIVTDSQY

SEQ ID NO: 22345 - protein, 9 aa, Artificial Sequence
  Description of Artificial Sequence: Synthetic peptide
EEINLPGKW

SEQ ID NO: 22346 - protein, 9 aa, Artificial Sequence
  Description of Artificial Sequence: Synthetic peptide
SAEPVPLQL

SEQ ID NO: 22347 - protein, 9 aa, Artificial Sequence
  Description of Artificial Sequence: Synthetic peptide
LILGDINNL

SEQ ID NO: 22348 - protein, 9 aa, Artificial Sequence
  Description of Artificial Sequence: Synthetic peptide
MIIGGLIGL

SEQ ID NO: 22349 - protein, 8 aa, Artificial Sequence
  Description of Artificial Sequence: Synthetic peptide
FALNPNLL
